(19) United States
(12) Patent Application Publication
(10) Pub. No.: US 2023/0110201 A1
(43) Pub. Date: Apr. 13, 2023

(54) PSEUDOTYPED RECOMBINANT LYSSAVIRUSES FOR GENE THERAPY

(71) Applicant: BEAM THERAPEUTICS INC., Cambridge, MA (US)

(72) Inventors: Fei Ran, Cambridge, MA (US); ChieYu Lin, Cambridge, MA (US)

(21) Appl. No.: 17/873,666

(22) Filed: Jul. 26, 2022

Related U.S. Application Data
(60) Provisional application No. 63/225,898, filed on Jul. 26, 2021.

(51) Int. Cl. C12N 15/86; C12N 15/11; C12N 9/22; A61K 48/00

(52) U.S. Cl. CPC C12N 15/86; C12N 15/11; C12N 9/22; A61K 48/0008; C12N 2760/20122; C12N 2760/20143; C12N 2760/20152; C12N 2310/20; C12N 2800/80

(57) ABSTRACT

Provided herein are pseudotyped recombinant lyssavirus particles and methods for their use in delivering a transgene into a target cell. Also provided are packaging systems and methods of using the packaging systems to produce pseudotyped recombinant lyssavirus particles.

### RELATED APPLICATIONS

[0001] This application claims the benefit of U.S. Provisional Patent Application Ser. No. 63/225,898, filed Jul. 26, 2021, the entire disclosure of which is hereby incorporated herein by reference.

### SEQUENCE LISTING

[0002] The instant application contains a Sequence Listing which has been submitted electronically in XML format and is hereby incorporated by reference in its entirety. Said XML file, created on Dec. 11, 2022, is named 730174_BEAM9-001_ST26.xml and is 1,347,153 bytes in size.

### BACKGROUND

[0003] Gene therapies largely involve the use of viral gene delivery systems in order to transduce a cell of interest and express a transgene. Viral systems that are commonly used for gene therapy are derived from viruses and suffer from significant disadvantages. The challenges in using current viral systems include: limited, small packaging capacities; unintended resultant consequences such as genomic integration; limited tissue tropism; pre-existing immunity and/or immune responses in the target population, limited ability for re-dosing; and limited durability due to genome instability, immune clearance, and cellular toxicity. For example, while adenoviral vector-mediated gene therapy demonstrates high transduction efficiency and can be used to infect many different cell types, certain disadvantages include non-integration and high immunogenicity. Disadvantages of adeno-associated viral vector-mediated gene therapy include high immunogenicity, and limited packaging capacity. As another example, retroviral vector-mediated gene therapy suffers from low transduction efficiency and the inactivation by complement.

[0004] Accordingly, there is a need for novel viral gene delivery systems that are advantages over current viral systems.

### SUMMARY

[0005] Provided herein are pseudotyped recombinant lyssavirus particles comprising a recombinant lyssavirus genome that comprises a nucleic acid encoding a therapeutic transgene. Such pseudotyped lyssavirus particles are capable of transfecting a human cell, and find use in gene therapy applications where the pseudotyped lyssavirus particle can be used to transduce target cells, where the transgene is expressed. The pseudotyped lyssavirus particles described herein comprise a heterologous envelope protein. While lyssavirus particles have a natural tropism for neuronal cell types, the pseudotyped recombinant lyssavirus particles described herein adopt the tropism of the pseudotyping (i.e., heterologous) envelope protein. As such, the pseudotyped recombinant lyssavirus particles described herein can exhibit tropism for neuronal as well as non-neuronal cell types.

[0006] The pseudotyped particles described herein provide a versatile viral delivery system that is not limited by packaging capacity. Due to the “bullet” shaped nature of lyssavirus particles, the payload can potentially be expanded beyond the capacity of currently used viral delivery systems. For example, the packaging capacity of adeno-associated virus is about 4,500 bp, adenovirus is about 8,500 bp, and lentivirus is about 10,000 bp. Accordingly, the pseudotyped particles described herein can overcome the limitations of currently used viral delivery systems.

[0007] In certain aspects, the disclosure provides a pseudotyped recombinant lyssavirus particle, comprising a heterologous envelope protein and a recombinant lyssavirus genome, wherein the recombinant lyssavirus genome does not encode an endogenous envelope protein or fragment thereof and comprises a nucleic acid encoding a therapeutic transgene.

[0008] In certain embodiments, the pseudotyped recombinant lyssavirus particle comprises a heterologous envelope protein and a recombinant lyssavirus genome, wherein the recombinant lyssavirus genome does not encode an endogenous envelope protein or fragment thereof and comprises a nucleic acid encoding a therapeutic transgene.

[0009] In certain embodiments, the nucleic acid encoding the therapeutic transgene is greater than: about 300 bp, about 400 bp, about 500 bp, about 600 bp, about 700 bp, about 800 bp, about 900 bp, about 1,000 bp, about 1,100 bp, about 1,200 bp, about 1,300 bp, about 1,400 bp, about 1,500 bp, about 1,600 bp, about 1,700 bp, about 1,800 bp, about 1,900 bp, about 2,000 bp, about 2,100 bp, about 2,200 bp, about 2,300 bp, about 2,400 bp, about 2,500 bp, about 2,600 bp, about 2,700 bp, about 2,800 bp, about 2,900 bp, or about 3,000 bp. In certain embodiments, the nucleic acid encoding the therapeutic transgene is greater than about 300 bp, is provided. In certain embodiments the nucleic acid encoding the therapeutic transgene is greater than about 650 bp. In certain embodiments the nucleic acid encoding the therapeutic transgene is greater than about 1,000 bp. In certain embodiments the nucleic acid encoding the therapeutic transgene is greater than about 3,000 bp. In certain embodiments the nucleic acid encoding the therapeutic transgene is greater than about 4,500 bp. In certain embodiments the nucleic acid encoding the therapeutic transgene is greater than about 8,500 bp. In certain embodiments the nucleic acid encoding the therapeutic transgene is greater than about 10,000.

[0010] In certain embodiments the recombinant lyssavirus particle is a recombinant rabies virus particle. In certain embodiments the heterologous envelope protein is a non-rabies virus envelope protein. In certain embodiments the heterologous envelope protein is a envelope protein of a virus in the Togaviridae family, or variant thereof. In certain embodiments the heterologous envelope protein is a envelope protein of a virus in the Togaviridae family is an alphavirus. In certain embodiments the heterologous envelope protein is a envelope protein of the alphavirus selected from the group consisting of: a sindbis virus (SINV), a chikungunya virus (CHIKV), a Mayaro virus (MAYV), an o'nyong'nyong virus (ONNV), a Ross River virus (RRV), and an equine encephalitis virus (EEV). In certain embodiments the SINV envelope protein comprises an amino acid sequence with at least 80% identity to an amino acid sequence set forth in SEQ ID NO: 2003 or 2005. In certain embodiments the CHIKV envelope protein comprises an amino acid sequence with at least 80% identity to an amino acid sequence set forth in SEQ ID NO: 2009. In certain embodiments the MAYV envelope protein comprises an amino acid sequence with at least 80% identity to an amino acid sequence set forth in SEQ ID NO: 2011. In certain embodiments the ONNV envelope protein comprises an amino acid sequence with at least 80% identity to an amino acid sequence set forth in SEQ ID NO: 2013. In certain embodiments the RRV envelope protein comprises an amino acid sequence with at least 80% identity to an amino acid sequence set forth in SEQ ID NO: 2015.

[0011] In certain embodiments the envelope protein of EEV is selected from the group consisting of: a western equine encephalitis virus (WEEV), an eastern equine encephalitis virus (EEEV), and a Venezuelan equine encephalitis virus (VEEV). In certain embodiments the WEEV envelope protein comprises an amino acid sequence with at least 80% identity to an amino acid sequence set forth in SEQ ID NO: 2017. In certain embodiments the EEEV envelope protein comprises an amino acid sequence with at least 80% identity to an amino acid sequence set forth in SEQ ID NO: 2019. In certain embodiments the VEEV envelope protein comprises an amino acid sequence with at least 80% identity to an amino acid sequence set forth in SEQ ID NO: 2021.

[0012] In certain embodiments the heterologous envelope protein is a envelope protein of a tibrovirus, or variant thereof. In certain embodiments the tibrovirus is Ekpoma virus (EKV, e.g., Ekpoma virus 1 (EKV-1) or Ekpoma virus 2 (EKV-2). In certain embodiments the EKV-1 envelope protein comprises an amino acid sequence with at least 80% identity to an amino acid sequence set forth in SEQ ID NO: 2029. In certain embodiments the EKV-2 envelope protein comprises an amino acid sequence with at least 80% identity to an amino acid sequence set forth in SEQ ID NO: 2031.

[0013] In certain embodiments the heterologous envelope protein is a envelope protein of a virus in the Flaviviridae family, or variant thereof. In certain embodiments, the virus in the Flaviviridae family is selected from the group consisting of a Hepacivirus, a pegivirus, and a flavivirus. In certain embodiments the heterologous envelope protein is a envelope protein of the Hepacivirus, e.g., hepatitis C virus (HCV). In certain embodiments the HCV envelope protein comprises an amino acid sequence with at least 80% identity to an amino acid sequence set forth in SEQ ID NO: 2033. In certain embodiments the envelope protein of pegivirus is human pegivirus type 1 (HPgV-1) or human pegivirus type 2 (HPgV-2). In certain embodiments the HPgV-1 envelope protein comprises an amino acid sequence with at least 80% identity to an amino acid sequence set forth in SEQ ID NO: 2035. In certain embodiments the HPgV-2 envelope protein comprises an amino acid sequence with at least 80% identity to an amino acid sequence set forth in SEQ ID NO: 2037. In certain embodiments the heterologous envelope protein is a envelope protein of Zika virus (ZIKV). In certain embodiments the ZIKV envelope protein comprises an amino acid sequence with at least 80% identity to an amino acid sequence set forth in SEQ ID NO: 2039.

[0014] In certain embodiments the heterologous envelope protein is a envelope protein of a virus in the Filoviridae family, or variant thereof. In certain embodiments, the virus in the Filoviridae family is Marburg virus (MARV). In certain embodiments the MARV envelope protein comprises an amino acid sequence with at least 80% identity to an amino acid sequence set forth in SEQ ID NO: 2041.

[0015] In certain embodiments the envelope protein of a virus in the Paramyxoviridae family, or variant thereof. In certain embodiments the Paramyxoviridae family is Henipavirus. In another embodiment the Henipavirus is Nipah/Hendra virus (NIV). In certain embodiments the NIV envelope protein comprises an amino acid sequence with at least 80% identity to an amino acid sequence set forth in SEQ ID NO: 2043.

[0016] In certain embodiments the heterologous envelope protein is a envelope protein of a virus in the Retroviridae family, or variant thereof. In certain embodiments Retroviridae family is a lentivirus. In certain embodiments the lentivirus is human immunodeficiency virus type 1 (HIV-1) or human immunodeficiency virus type 2 (HIV-2). In certain embodiments virus in the Retroviridae family is a baboon endogenous retrovirus (BAEV).

[0017] In certain embodiments the therapeutic transgene comprises a nucleic acid editing system or a component thereof. In certain embodiments the therapeutic transgene comprises a nucleic acid editing system or a component thereof selected from the group consisting of a Clustered Regulatory Interspaced Short Palindromic Repeat (CRISPR) system, a zinc finger protein (ZF), a meganuclease, and a Transcription Activator-Like Effector-based protein (TALE), is provided. In another embodiment, the therapeutic transgene comprises a nucleic acid editing system or a component thereof is a CRISPR system, is provided. In another embodiment, the CRISPR-system comprises a nucleobase editor comprising a polynucleotide programmable nucleotide binding domain and a nucleobase editing domain. In certain embodiments the CRISPR-system comprises a nucleobase editor wherein the nucleobase editing domain is an adenosine deaminase, cytidine deaminase, cytosine deaminase, or a functional variant thereof. In certain embodiments the CRISPR-system comprises a nucleobase editor wherein the nucleobase editing domain is an adenosine deaminase.

[0018] In certain embodiments the CRISPR-system comprises a nucleobase editor wherein the nucleobase editing domain is an adenosine deaminase recited in Table 10, Table 11, Table 12, Table 13, Table 14, or Table 15. In certain embodiments the nucleobase editing domain is an adenosine deaminase selected from the group consisting of: ABE 0.1, ABE 0.2, ABE 1.1, ABE 1.2, ABE2.1, ABE2.2, ABE2.3, ABE2.4, ABE2.5, ABE2.6, ABE2.7, ABE2.8, ABE2.9, ABE2.10, ABE2.11, ABE2.12, ABE3.1, ABE3.2, ABE3.3, ABE3.4, ABE3.5, ABE3.6, ABE3.7, ABE3.8, ABE4.1, ABE4.2, ABE4.3, ABE5.1, ABE5.2, ABE5.3, ABE5.4, ABE5.5, ABE5.6, ABE5.7, ABE5.8, ABE5.9, ABE5.10, ABE5.11, ABE5.12, ABE5.13, ABE5.14, ABE6.1, ABE6.2, ABE6.3, ABE6.4, ABE6.5, ABE6.6, ABE7.1, ABE7.2, ABE7.3, ABE7.4, ABE7.5, ABE7.6, ABE7.7, ABE7.8, ABE 7.9, ABE7.10, ABE8.1-m, ABE8.2-m, ABE8.3-m, ABE8.4-m, ABE8.5-m, ABE8.6-m, ABE8.7-m, ABE8.8-m, ABE8.9-m, ABE8.10-m, ABE8.11-m, ABE8.12-m, ABE8.13-m, ABE8.14-m, ABE8.15-m, ABE8.16-m, ABE8.17-m, ABE8.18-m, ABE8.19-m, ABE8.20-m, ABE8.21-m, ABE8.22-m, ABE8.23-m, ABE8.24-m, ABE8.1-d, ABE8.2-d, ABE8.3-d, ABE8.4-d, ABE8.5-d, ABE8.6-d, ABE8.7-d, ABE8.8-d, ABE8.9-d, ABE8.10-d, ABE8.11-d, ABE8.12-d, ABE8.13-d, ABE8.14-d, ABE8.15-d, ABE8.16-d, ABE8.17-d, ABE8.18-d, ABE8.19-d, ABE8.20-d, ABE8.21-d, ABE8.22-d, ABE8.23-d, ABE8.24-d, ABE8a-m, ABE8b-m, ABE8c-m, ABE8d-m, ABE8e-m, ABE8a-d, ABE8b-d, ABE8c-d, ABE8d-d, ABE8e-d, ABE9.1, ABE9.2, ABE9.3, ABE9.4, ABE9.5, ABE9.6, ABE9.7, ABE9.8, ABE9.9, ABE9.10, ABE9.11, ABE9.12, ABE9.13, ABE9.14, ABE9.15, ABE9.16, ABE9.17, ABE9.18, ABE9.19, ABE9.2, ABE9.21, ABE9.22, ABE9.23, ABE9.24, ABE9.25, ABE9.26, ABE9.27, ABE9.28, ABE9.29, ABE9.30, ABE9.31, ABE9.32, ABE9.33, ABE9.34, ABE9.35, ABE9.36, ABE9.37, ABE9.38, ABE9.39, ABE9.40, ABE9.41, ABE9.42, ABE9.43, ABE9.44, ABE9.45, ABE9.46, ABE9.47, ABE9.48, ABE9.49, ABE9.50, ABE9.51, ABE9.52, ABE9.53, ABE9.54, ABE9.55, ABE9.56, ABE9.57, and ABE9.58. In certain embodiments the adenosine deaminase is ABE7.10.

[0019] In certain embodiments the polynucleotide programmable nucleotide binding domain is a Cas9 polypeptide, a Cas12 polypeptide, or a functional variant thereof.

[0020] In certain embodiments the CRISPR-system further comprises a guide RNA (gRNA) or a nucleic acid sequence encoding a gRNA, is provided.

[0021] In certain embodiments the therapeutic transgene comprises a therapeutic polypeptide and/or a therapeutic nucleic acid. In certain embodiments the therapeutic transgene is operably linked to a transcriptional regulatory element. In certain embodiments the therapeutic transgene is operably linked to a transcriptional regulatory element comprising a transcription initiation signal. In certain embodiments the transcription initiation signal is exogenous to the rabies virus. In other embodiments the transcription initiation signal is endogenous to the rabies virus. In certain embodiments the therapeutic transgene is operably linked to a transcription termination polyadenylation signal.

[0022] In certain embodiments the recombinant lyssavirus genome lacks a G gene encoding for a envelope protein or a functional variant thereof, and/or the genome lacks an L gene encoding for a polymerase or a functional variant thereof. In certain embodiments the recombinant lyssavirus genome lacks a G gene encoding for a envelope protein or a functional variant thereof. In certain embodiments the recombinant lyssavirus genome lacks a G gene encoding for a envelope protein or a functional variant thereof, and the genome lacks an L gene encoding for a polymerase or a functional variant thereof.

In certain embodiments the recombinant lyssavirus genome comprises: an N gene encoding for a nucleoprotein or a functional variant thereof; a P gene encoding for a phosphoprotein or a functional variant thereof; and an M gene encoding for a matrix protein or a functional variant thereof.

[0023] In certain embodiments the disclosure provides pseudotyped recombinant lyssavirus particle, comprising a heterologous envelope protein and a recombinant lyssavirus genome, wherein the heterologous envelope protein is a envelope protein of a virus in the Togaviridae family; the recombinant lyssavirus genome does not encode an endogenous envelope protein or fragment thereof and comprises a nucleic acid encoding a therapeutic transgene.

[0024] In certain exemplary embodiments, the virus in the Togaviridae family is an alphavirus. In certain exemplary embodiments, the alphavirus is selected from the group consisting of: a sindbis virus (SINV), a chikungunya virus (CHIKV), a Mayaro virus (MAYV), an o'nyong'nyong virus (ONNV), a Ross River virus (RRV), and an equine encephalitis virus (EEV)). In certain exemplary embodiments, the EEV is selected from the group consisting of: a western equine encephalitis virus (WEEV), an eastern equine encephalitis virus (EEEV), and a Venezuelan equine encephalitis virus (VEEV).

[0025] In certain exemplary embodiments, the disclosure provides a pseudotyped recombinant lyssavirus particle, comprising a heterologous envelope protein and a recombinant lyssavirus genome, wherein the heterologous envelope protein is a envelope protein of a virus in the Filoviridae family; the recombinant lyssavirus genome does not encode an endogenous envelope protein or fragment thereof and comprises a nucleic acid encoding a therapeutic transgene.

[0026] In certain exemplary embodiments, the heterologous envelope protein is a envelope protein of a virus in the Filoviridae family, e.g., Marburg virus (MARV).

[0027] In certain embodiments, the recombinant lyssavirus particle is capable of transfecting a human cell, wherein the human cell expresses the therapeutic transgene.

[0028] In certain embodiments, the recombinant lyssavirus genome does not encode an envelope protein or fragment thereof.

[0029] In another aspect, the disclosure provides a pharmaceutical composition comprising a pseudotyped particle as described herein.

[0030] In another aspect, the disclosure provides a method for expressing a therapeutic transgene in a target cell, comprising transducing a target cell with the pseudotyped particle as described herein. In certain embodiments, the target cell is a neuronal cell, an epithelial cell, a hepatocyte, an immune cell, a muscle cell, a kidney cell, a lung cell, or a bone cell. In certain embodiments, the immune cell is a T cell. In certain embodiments, the neuronal cell is a neuroblast cell. In certain embodiments, the muscle cell is a myoblast cell. In certain embodiments, the lung cell is an alveolar cell. In certain embodiments, the bone cell is an osteoblast, osteocyte, or osteoclast. In certain embodiments, the target cell is a human cell. In certain embodiments, the target cell is in a human.

[0031] In another aspect, a method for delivering a therapeutic transgene to a subject, comprising administering to the subject the pseudotyped particle as described herein, or the pharmaceutical composition as described herein, is provided.

[0032] In another aspect, a packaging system capable of producing the pseudotyped particle as described herein, is provided.

[0033] In another aspect, the disclosure provides a method for producing a pseudotyped recombinant lyssavirus particle, the method comprising: introducing a packaging system capable of producing the pseudotyped particle as disclosed herein into a first cell to form a recombinant lyssavirus particle, thereby generating a supernatant comprising the recombinant lassavirus particle; isolating the supernatant comprising the recombinant lyssavirus particle; and contacting the supernatant with a second cell that expresses a heterologous envelope protein, thereby producing the pseudotyped recombinant lyssavirus particle.

[0034] In certain embodiments, the second cell expresses the heterologous envelope protein. In certain embodiments, the second cell stably or transiently expresses the heterologous envelope protein. In certain embodiments, the introducing is mediated by electroporation, nucleofection, transduction, or lipofection, is provided. In another aspect, the method as disclosed herein, wherein the first and/or the second cell is of a mammalian, a bacterial, or an insect origin. In certain embodiments, the first and/or the second cell is selected from the group consisting of a HEK293 cell, a VERO cell, a BHK cell, and a BSR cell.

[0035] In another aspect, a packaging cell comprising the packaging system as disclosed herein is provided. In certain embodiments, the packaging cell is of a mammalian, a bacterial, or an insect origin. In certain embodiments, the packaging cell is selected from the group consisting of a HEK293 cell, a VERO cell, a BHK cell, and a BSR cell.

[0036] In another aspect, the disclosure provides a method for producing a pseudotyped recombinant lyssavirus particle, the method comprising: introducing into the packaging cell as disclosed herein, a nucleic acid comprising a recombinant lyssavirus genome comprising a nucleic acid comprising a therapeutic transgene, to form a recombinant lyssavirus particle, thereby generating a supernatant comprising the recombinant lassavirus particle; isolating the supernatant comprising the recombinant lyssavirus particle; and contacting the supernatant with a cell that expresses a heterologous envelope protein, thereby producing the pseudotyped recombinant lyssavirus particle.

[0037] In certain embodiments, the introducing is mediated by electroporation, nucleofection, transduction, or lipofection. In certain embodiments, the cell that expresses the heterologous envelope protein is of a mammalian, a bacterial, or an insect origin. In certain embodiments, the cell that expresses the heterologous envelope protein is selected from the group consisting of a HEK293 cell, a VERO cell, a BHK cell, and a BSR cell, is provided.

### BRIEF DESCRIPTION OF THE DRAWINGS

[0038] FIG. 1 depicts relative % entry into 293T cells by pseudotyped RABV particles. RABV ΔG expressing GFP where pseudotyped with one of several rhabdovirus envelope proteins (MOKV, VSV, EKV1, and EKV2 envelope proteins). Several volumes of cell culture supernantant (2 days postinfection supernantant or 4 days postinfection supernantant) were used to infect the 293T cells.

[0039] FIG. 2A-FIG. 2B depict fluorescent images of cells 1 day postinfection (FIG. 2A) and 4 days postinfection (FIG. 2B) with RABV ΔG expressing GFP pseudotyped with togavirus, rhabdovirus, and flavivirus envelope proteins. Among the togaviruses, envelope proteins of the alphaviruses SINV, SFV, and WEEV were employed. Among the rhabdoviruses, envelope proteins of RABV, MOKV, and VSV were employed. Among the flaviviruses, envelope proteins of the pegiviruses PGV1 and PGV2 were employed.

[0040] FIG. 3 depicts relative % entry into various cell lines by pseudotyped RABV particles. RABV ΔG expressing GFP where pseudotyped with one of a SINV, SFV, WEEV, RABV, MOKV, VSV, PGV1, or PGV2 envelope protein. Vero, HEK, BHK, BHK-NPL, ARPE, MOLT4, Jurkat, and K562 cell lines were employed. 16 μL of cell culture supernantant (2 days postinfection supernantant) were used to infect the cell lines.

[0041] FIG. 4A-FIG. 4C depict relative % entry into Jurkat, N2a, C2C12, Huh7, (FIG. 4A) Vero, Huh7 (FIG. 4B) and 293T (FIG. 4C) cells by pseudotyped RABV particles. RABV ΔG expressing GFP where pseudotyped with one of several rhabdovirus envelope proteins (RABV, MOKV, VSV, COCV, CHIKV, MAYV, ONNV, RRV, EEEV, VEEV, WEEV, (FIG. 4A), RABV, MOKV, VSV, COCV, CHIKV, MAYV, RRV, EEEV, WEEV (FIG. 4B), RABV, BASV, and BEFV (FIG. 4C) envelope proteins). For each glycoprotein in FIG. 4B, Vero cells are shown as the left abr and Huh7 cells are shown as the right bar. Several volumes of cell culture supernantant (2 days postinfection supernantant or 4 days postinfection supernantant) were used to infect several different titers of cells.

[0042] FIG. 5A-FIG. 5D depict relative % entry into 293T, A549, N2a, SKNSH, C2C12, U2OS, Huh7, Hep3B, and primary fibroblast cells by pseudotyped RABV particles. RABV ΔG expressing GFP where pseudotyped with one of several envelope proteins (RABV, BEFV, BASV, MARV, CHIKV, MAYV, and ONNV envelope proteins). 16 μL of cell culture supernantant (2 days postinfection supernantant or 4 days postinfection supernantant) were used to infect several a titer of 2.5e4 cells.

### DETAILED DESCRIPTION

[0043] It is to be understood that the methods described herein are not limited to particular methods and experimental conditions disclosed herein as such methods and conditions may vary. It is also to be understood that the terminology used herein is for the purpose of describing particular embodiments only, and is not intended to be limiting. The methods described herein use conventional molecular and cellular biological and immunological techniques that are well within the skill of the ordinary artisan. Such techniques are well known to the skilled artisan and are explained in the scientific literature.

### A. Definitions

[0044] Unless defined otherwise, all technical and scientific terms used herein have the meaning commonly understood by a person skilled in the art to which this invention belongs. The following references provide one of skill with a general definition of many of the terms used in this invention: Singleton et al., Dictionary of Microbiology and Molecular Biology (2nd ed. 1994); The Cambridge Dictionary of Science and Technology (Walker ed., 1988); The Glossary of Genetics, 5th Ed., R. Rieger et al. (eds.), Springer Verlag (1991); and Hale & Marham, The Harper Collins Dictionary of Biology (1991). As used herein, the following terms have the meanings ascribed to them below, unless specified otherwise.

[0045] By “adenosine deaminase” is meant a polypeptide or fragment thereof capable of catalyzing the hydrolytic deamination of adenine or adenosine. In some embodiments, the deaminase or deaminase domain is an adenosine deaminase catalyzing the hydrolytic deamination of adenosine to inosine or deoxy adenosine to deoxyinosine. In some embodiments, the adenosine deaminase catalyzes the hydrolytic deamination of adenine or adenosine in deoxyribonucleic acid (DNA). The adenosine deaminases (e.g. engineered adenosine deaminases, evolved adenosine deaminases) provided herein may be from any organism, such as a bacterium.

[0046] By “Adenosine Deaminase Base Editor 8 (ABE8) polypeptide” or “ABE8” is meant a base editor as defined herein comprising an adenosine deaminase variant comprising an alteration at amino acid position 82 and/or 166 of the following reference sequence:

(SEQ ID NO: 8)
MSEVEFSHEYWMRHALTLAKRARDEREVPVGAVLVLNNRVIGEGWNRAIG
LHDPTAHAEIMALRQGGLVMQNYRLIDATLYVTFEPCVMCAGAMIHSRIG
RVVFGVRNAKTGAAGSLMDVLHYPGMNHRVEITEGILADECAALLCYFFR
MPRQVFNAQKKAQSSTD.

[0047] In some embodiments, ABE8 comprises further alterations, as described herein, relative to the reference sequence.

[0048] By “Adenosine Deaminase Base Editor 8 (ABE8) polynucleotide” is meant a polynucleotide encoding an ABE8.

[0049] “Administering” is referred to herein as providing one or more compositions described herein to a patient or a subject.

[0050] By “agent” is meant any small molecule chemical compound, antibody, nucleic acid molecule, or polypeptide, or fragments thereof.

[0051] By “alteration” is meant a change (increase or decrease) in the level, structure, or activity of an analyte, gene or polypeptide as detected by standard art known methods such as those described herein. As used herein, an alteration includes a 10% change in expression levels, a 25% change, a 40% change, and a 50% or greater change in expression levels. In some embodiments, an alteration includes an insertion, deletion, or substitution of a nucleobase or amino acid.

[0052] By “ameliorate” is meant decrease, suppress, attenuate, diminish, arrest, or stabilize the development or progression of a disease.

[0053] By “analog” is meant a molecule that is not identical, but has analogous functional or structural features. For example, a polypeptide analog retains the biological activity of a corresponding naturally-occurring polypeptide, while having certain biochemical modifications that enhance the analog's function relative to a naturally occurring polypeptide. Such biochemical modifications could increase the analog's protease resistance, membrane permeability, or half-life, without altering, for example, ligand binding. An analog may include an unnatural amino acid.

[0054] By “base editor (BE),” or “nucleobase editor polypeptide (NBE)” is meant an agent that binds a polynucleotide and has nucleobase modifying activity. In various embodiments, the base editor comprises a nucleobase modifying polypeptide (e.g., a deaminase) and a polynucleotide programmable nucleotide binding domain (e.g., Cas9 or Cpf1) in conjunction with a guide polynucleotide (e.g., guide RNA (gRNA)). Representative nucleic acid and protein sequences of base editors are provided in the Sequence Listing as SEQ ID NOs: 274-283.

[0055] By “base editing activity” is meant acting to chemically alter a base within a polynucleotide. In one embodiment, a first base is converted to a second base. In one embodiment, the base editing activity is cytidine deaminase activity, e.g., converting target C•G to T•A. It should be appreciated that cytosine deaminases, or variants thereof, that are capable of deaminating cytosine in the context of a nucleic acid molecule (e.g., DNA) are contemplated. In another embodiment, the base editing activity is adenosine or adenine deaminase activity, e.g., converting A•T to G•C.

[0056] The term “base editor system” refers to an intermolecular complex for editing a nucleobase of a target nucleotide sequence. In various embodiments, the base editor (BE) system comprises (1) a polynucleotide programmable nucleotide binding domain, a deaminase domain (e.g., cytidine deaminase or adenosine deaminase) for deaminating nucleobases in the target nucleotide sequence; and (2) one or more guide polynucleotides (e.g., guide RNA) in conjunction with the polynucleotide programmable nucleotide binding domain. In various embodiments, the base editor (BE) system comprises a nucleobase editor domain selected from an adenosine deaminase or a cytidine deaminase, and a domain having nucleic acid sequence specific binding activity. In some embodiments, the base editor system comprises (1) a base editor (BE) comprising a polynucleotide programmable DNA binding domain and a deaminase domain for deaminating one or more nucleobases in a target nucleotide sequence; and (2) one or more guide RNAs in conjunction with the polynucleotide programmable DNA binding domain. In some embodiments, the polynucleotide programmable nucleotide binding domain is a polynucleotide programmable DNA binding domain. In some embodiments, the base editor is a cytidine base editor (CBE). In some embodiments, the base editor is an adenine or adenosine base editor (ABE). In some embodiments, the base editor is an adenine or adenosine base editor (ABE) or a cytidine base editor (CBE).

[0057] By “base editing activity” is meant acting to chemically alter a base within a polynucleotide. In one embodiment, a first base is converted to a second base. In one embodiment, the base editing activity is cytidine deaminase activity, e.g., converting target C•G to T•A. In another embodiment, the base editing activity is adenosine deaminase activity, e.g., converting A•T to G•C.

[0058] The term “Cas9” or “Cas9 domain” refers to an RNA guided nuclease comprising a Cas9 protein, or a fragment thereof (e.g., a protein comprising an active, inactive, or partially active DNA cleavage domain of Cas9, and/or the gRNA binding domain of Cas9). A Cas9 nuclease is also referred to sometimes as a casnl nuclease or a CRISPR (clustered regularly interspaced short palindromic repeat) associated nuclease.

[0059] The term “conservative amino acid substitution” or “conservative mutation” refers to the replacement of one amino acid by another amino acid with a common property. A functional way to define common properties between individual amino acids is to analyze the normalized frequencies of amino acid changes between corresponding proteins of homologous organisms (Schulz, G. E. and Schirmer, R. H., Principles of Protein Structure, Springer-Verlag, New York (1979)). According to such analyses, groups of amino acids can be defined where amino acids within a group exchange preferentially with each other, and therefore resemble each other most in their impact on the overall protein structure (Schulz, G. E. and Schirmer, R. H., supra). Non-limiting examples of conservative mutations include amino acid substitutions of amino acids, for example, lysine for arginine and vice versa such that a positive charge can be maintained; glutamic acid for aspartic acid and vice versa such that a negative charge can be maintained; serine for threonine such that a free —OH can be maintained; and glutamine for asparagine such that a free —NH₂ can be maintained.

[0060] The term “coding sequence” or “protein coding sequence” as used interchangeably herein refers to a segment of a polynucleotide that codes for a protein. Coding sequences can also be referred to as open reading frames. The region or sequence is bounded nearer the 5′ end by a start codon and nearer the 3′ end with a stop codon. Stop codons useful with the base editors described herein include the following:

| | |
|---|---|
| Glutamine | CAG → TAG Stop codon |
| | CAA → TAA |
| Arginine | CGA → TGA |
| Tryptophan | TGG → TGA |
| | TGG → TAG |
| | TGG → TAA |

[0061] By “cytidine deaminase” is meant a polypeptide or fragment thereof capable of catalyzing a deamination reaction that converts an amino group to a carbonyl group. In one embodiment, the cytidine deaminase converts cytosine to uracil or 5-methylcytosine to thymine. PmCDA1 (SEQ ID NO: 41-42), which is derived from Petromyzon marinus (Petromyzon marinus cytosine deaminase 1, “PmCDA1”), AID (Activation-induced cytidine deaminase; AICDA) (Exemplary AID polypeptide sequences are provided in the Sequence Listing as SEQ ID NOs: 43-44, 1372, and 1374-1377), which is derived from a mammal (e.g., human, swine, bovine, horse, monkey etc.), and APOBEC are exemplary cytidine deaminases (Exemplary APOBEC polypeptide sequences are provided in the Sequence Listing as SEQ ID NOs: 1378-1416, 1421, and 1422. Further exemplary cytidine deaminase (CDA) sequences are provided in the Sequence Listing as SEQ ID NOs: 1373, 1417-1420. Additional exemplary cytidine deaminase sequences, including APOBEC polypeptide sequences, are provided in the Sequence Listing as SEQ ID NOs: 1378-1422.

[0062] The term “deaminase” or “deaminase domain,” as used herein, refers to a protein or enzyme that catalyzes a deamination reaction.

[0063] “Detect” refers to identifying the presence, absence or amount of the analyte to be detected. In one embodiment, a sequence alteration in a polynucleotide or polypeptide is detected. In another embodiment, the presence of indels is detected.

[0064] By “detectable label” is meant a composition that when linked to a molecule of interest renders the latter detectable, via spectroscopic, photochemical, biochemical, immunochemical, or chemical means. For example, useful labels include radioactive isotopes, magnetic beads, metallic beads, colloidal particles, fluorescent dyes, electron-dense reagents, enzymes (for example, as commonly used in an enzyme linked immunosorbent assay (ELISA)), biotin, digoxigenin, or haptens.

[0065] By “disease” is meant any condition or disorder that damages or interferes with the normal function of a cell, tissue, or organ. Exemplary diseases include neurological diseases and ophthalmic diseases.

[0066] By “effective amount” is meant the amount of an agent or active compound, e.g., a base editor as described herein, that is required to ameliorate the symptoms of a disease relative to an untreated patient or an individual without disease, i.e., a healthy individual, or is the amount of the agent or active compound sufficient to elicit a desired biological response. The effective amount of active compound(s) used to practice the present invention for therapeutic treatment of a disease varies depending upon the manner of administration, the age, body weight, and general health of the subject. Ultimately, the attending physician or veterinarian will decide the appropriate amount and dosage regimen. Such amount is referred to as an “effective” amount. In one embodiment, an effective amount is the amount of a base editor of the invention sufficient to introduce an alteration in a gene of interest in a cell (e.g., a cell in vitro or in vivo). In one embodiment, an effective amount is the amount of a base editor required to achieve a therapeutic effect. Such therapeutic effect need not be sufficient to alter a pathogenic gene in all cells of a subject, tissue or organ, but only to alter the pathogenic gene in about 1%, 5%, 10%, 25%, 50%, 75% or more of the cells present in a subject, tissue or organ. In one embodiment, an effective amount is sufficient to ameliorate one or more symptoms of a disease.

[0067] The term “exonuclease” refers to a protein or polypeptide capable of digesting a nucleic acid (e.g., RNA or DNA) from free ends.

[0068] The term “endonuclease” refers to a protein or polypeptide capable of catalyzing (e.g., cleaving) internal regions in a nucleic acid (e.g., DNA or RNA).

[0069] By “fragment” is meant a portion of a polypeptide or nucleic acid molecule. This portion contains, at least about 10%, 20%, 30%, 40%, 50%, 60%, 70%, 80%, or 90% of the entire length of the reference nucleic acid molecule or polypeptide. A fragment may contain 10, 20, 30, 40, 50, 60, 70, 80, 90, or 100, 200, 300, 400, 500, 600, 700, 800, 900, or 1000 nucleotides or amino acids.

[0070] By “guide RNA” or “gRNA” is meant a polynucleotide or polynucleotide complex which is specific for a target sequence and can form a complex with a polynucleotide programmable nucleotide binding domain protein (e.g., Cas9 or Cpf1). In an embodiment, the guide polynucleotide is a guide RNA (gRNA). gRNAs can exist as a complex of two or more RNAs, or as a single RNA molecule.

[0071] “Hybridization” means hydrogen bonding, which may be Watson-Crick, Hoogsteen or reversed Hoogsteen hydrogen bonding, between complementary nucleobases. For example, adenine and thymine are complementary nucleobases that pair through the formation of hydrogen bonds.

[0072] By “increases” is meant a positive alteration of at least 10%, 25%, 50%, 75%, or 100%.

[0073] The terms “inhibitor of base repair”, “base repair inhibitor”, “IBR” or their grammatical equivalents refer to a protein that is capable in inhibiting the activity of a nucleic acid repair enzyme, for example a base excision repair enzyme.

[0074] The terms “isolated,” “purified,” or “biologically pure” refer to material that is free to varying degrees from components which normally accompany it as found in its native state. “Isolate” denotes a degree of separation from original source or surroundings. “Purify” denotes a degree of separation that is higher than isolation. A “purified” or “biologically pure” protein is sufficiently free of other materials such that any impurities do not materially affect the biological properties of the protein or cause other adverse consequences. That is, a nucleic acid or peptide of this invention is purified if it is substantially free of cellular material, viral material, or culture medium when produced by recombinant DNA techniques, or chemical precursors or other chemicals when chemically synthesized. Purity and homogeneity are typically determined using analytical chemistry techniques, for example, polyacrylamide gel electrophoresis or high performance liquid chromatography. The term “purified” can denote that a nucleic acid or protein gives rise to essentially one band in an electrophoretic gel. For a protein that can be subjected to modifications, for example, phosphorylation or glycosylation, different modifications may give rise to different isolated proteins, which can be separately purified.

[0075] By “isolated polynucleotide” is meant a nucleic acid (e.g., a DNA) that is free of the genes which, in the naturally-occurring genome of the organism from which the nucleic acid molecule of the invention is derived, flank the gene. The term therefore includes, for example, a recombinant DNA that is incorporated into a vector; into an autonomously replicating plasmid or virus; or into the genomic DNA of a prokaryote or eukaryote; or that exists as a separate molecule (for example, a cDNA or a genomic or cDNA fragment produced by PCR or restriction endonuclease digestion) independent of other sequences. In addition, the term includes an RNA molecule that is transcribed from a DNA molecule, as well as a recombinant DNA that is part of a hybrid gene encoding additional polypeptide sequence.

[0076] By an “isolated polypeptide” is meant a polypeptide of the invention that has been separated from components that naturally accompany it. Typically, the polypeptide is isolated when it is at least 60%, by weight, free from the proteins and naturally-occurring organic molecules with which it is naturally associated. Preferably, the preparation is at least 75%, more preferably at least 90%, and most preferably at least 99%, by weight, a polypeptide of the invention. An isolated polypeptide of the invention may be obtained, for example, by extraction from a natural source, by expression of a recombinant nucleic acid encoding such a polypeptide; or by chemically synthesizing the protein. Purity can be measured by any appropriate method, for example, column chromatography, polyacrylamide gel electrophoresis, or by HPLC analysis.

[0077] The term “mutation,” as used herein, refers to a substitution of a residue within a sequence, e.g., a nucleic acid or amino acid sequence, with another residue, or a deletion or insertion of one or more residues within a sequence. Mutations are typically described herein by identifying the original residue followed by the position of the residue within the sequence and by the identity of the newly substituted residue. Various methods for making the amino acid substitutions (mutations) provided herein are well known in the art, and are provided by, for example, Green and Sambrook, Molecular Cloning: A Laboratory Manual (4^{th} ed., Cold Spring Harbor Laboratory Press, Cold Spring Harbor, N.Y. (2012)).

[0078] The terms “nucleic acid” and “nucleic acid molecule,” as used herein, refer to a compound comprising a nucleobase and an acidic moiety, e.g., a nucleoside, a nucleotide, or a polymer of nucleotides. Typically, polymeric nucleic acids, e.g., nucleic acid molecules comprising three or more nucleotides are linear molecules, in which adjacent nucleotides are linked to each other via a phosphodiester linkage. In some embodiments, “nucleic acid” refers to individual nucleic acid residues (e.g. nucleotides and/or nucleosides). In some embodiments, “nucleic acid” refers to an oligonucleotide chain comprising three or more individual nucleotide residues. As used herein, the terms “oligonucleotide” and “polynucleotide” can be used interchangeably to refer to a polymer of nucleotides (e.g., a string of at least three nucleotides). In some embodiments, “nucleic acid” encompasses RNA as well as single and/or double-stranded DNA. Nucleic acids may be naturally occurring, for example, in the context of a genome, a transcript, an mRNA, tRNA, rRNA, siRNA, snRNA, a plasmid, cosmid, chromosome, chromatid, or other naturally occurring nucleic acid molecule. On the other hand, a nucleic acid molecule may be a non-naturally occurring molecule, e.g., a recombinant DNA or RNA, an artificial chromosome, an engineered genome, or fragment thereof, or a synthetic DNA, RNA, DNA/RNA hybrid, or including non-naturally occurring nucleotides or nucleosides. Furthermore, the terms “nucleic acid,” “DNA,” “RNA,” and/or similar terms include nucleic acid analogs, e.g., analogs having other than a phosphodiester backbone. Nucleic acids can be purified from natural sources, produced using recombinant expression systems and optionally purified, chemically synthesized, etc. Where appropriate, e.g., in the case of chemically synthesized molecules, nucleic acids can comprise nucleoside analogs such as analogs having chemically modified bases or sugars, and backbone modifications. A nucleic acid sequence is presented in the 5′ to 3′ direction unless otherwise indicated. In some embodiments, a nucleic acid is or comprises natural nucleosides (e.g. adenosine, thymidine, guanosine, cytidine, uridine, deoxyadenosine, deoxythymidine, deoxyguanosine, and deoxycytidine); nucleoside analogs (e.g., 2-aminoadenosine, 2-thiothymidine, inosine, pyrrolo-pyrimidine, 3-methyl adenosine, 5-methylcytidine, 2-aminoadenosine, C5-bromouridine, C5-fluorouridine, C5-iodouridine, C5-propynyl-uridine, C5-propynyl-cytidine, C5-methylcytidine, 2-aminoadenosine, 7-deazaadenosine, 7-deazaguanosine, 8-oxoadenosine, 8-oxoguanosine, O(6)-methylguanine, and 2-thiocytidine); chemically modified bases; biologically modified bases (e.g., methylated bases); intercalated bases; modified sugars (2′-e.g., fluororibose, ribose, 2′-deoxyribose, arabinose, and hexose); and/or modified phosphate groups (e.g., phosphorothioates and 5′-N-phosphoramidite linkages).

[0079] The term “nuclear localization sequence,” “nuclear localization signal,” or “NLS” refers to an amino acid sequence that promotes import of a protein into the cell nucleus. Nuclear localization sequences are known in the art and described, for example, in Plank et al., International PCT application, PCT/EP2000/011690, filed Nov. 23, 2000, published as WO/2001/038547 on May 31, 2001, the contents of which are incorporated herein by reference for their disclosure of exemplary nuclear localization sequences. In other embodiments, the NLS is an optimized NLS described, for example, by Koblan et al., Nature Biotech. 2018 doi:10.1038/nbt.4172. In some embodiments, an NLS comprises the amino acid sequence KRTADGSEFESPKKKRKV (SEQ ID NO: 84), KRPAATKKAGQAKKKK (SEQ ID NO: 85), KKTELQTTNAENKTKKL (SEQ ID NO: 86), KRGINDRNFWRGENGRKTR (SEQ ID NO: 87), RKSGKIAAIVVKRPRK (SEQ ID NO: 88), PKKKRKV (SEQ ID NO: 89), or MDSLLMNRRKFLYQFKNVRWAKGRRETYLC (SEQ ID NO: 90).

[0080] The term “nucleobase,” “nitrogenous base,” or “base,” used interchangeably herein, refers to a nitrogen-containing biological compound that forms a nucleoside, which in turn is a component of a nucleotide. The ability of nucleobases to form base pairs and to stack one upon another leads directly to long-chain helical structures such as ribonucleic acid (RNA) and deoxyribonucleic acid (DNA). Five nucleobases—adenine (A), cytosine (C), guanine (G), thymine (T), and uracil (U)—are called primary or canonical. Adenine and guanine are derived from purine, and cytosine, uracil, and thymine are derived from pyrimidine. DNA and RNA can also contain other (non-primary) bases that are modified. Non-limiting exemplary modified nucleobases can include hypoxanthine, xanthine, 7-methylguanine, 5,6-dihydrouracil, 5-methylcytosine (m5C), and 5-hydromethylcytosine. Hypoxanthine and xanthine can be created through mutagen presence, both of them through deamination (replacement of the amine group with a carbonyl group). Hypoxanthine can be modified from adenine. Xanthine can be modified from guanine. Uracil can result from deamination of cytosine. A “nucleoside” consists of a nucleobase and a five carbon sugar (either ribose or deoxyribose). Examples of a nucleoside include adenosine, guanosine, uridine, cytidine, 5-methyluridine (m5U), deoxyadenosine, deoxyguanosine, thymidine, deoxyuridine, and deoxycytidine. Examples of a nucleoside with a modified nucleobase includes inosine (I), xanthosine (X), 7-methylguanosine (m7G), dihydrouridine (D), 5-methylcytidine (m5C), and pseudouridine (ψ). A “nucleotide” consists of a nucleobase, a five carbon sugar (either ribose or deoxyribose), and at least one phosphate group.

[0081] The terms “nucleic acid” and “nucleic acid molecule,” as used herein, refer to a compound comprising a nucleobase and an acidic moiety, e.g., a nucleoside, a nucleotide, or a polymer of nucleotides.

[0082] As used herein, the terms “oligonucleotide” and “polynucleotide” can be used interchangeably to refer to a polymer of nucleotides.

[0083] The term “nucleic acid programmable DNA binding protein” or “napDNAbp” may be used interchangeably with “polynucleotide programmable nucleotide binding domain” to refer to a protein that associates with a nucleic acid (e.g., DNA or RNA), such as a guide nucleic acid or guide polynucleotide (e.g., gRNA), that guides the napDNAbp to a specific nucleic acid sequence. In some embodiments, the polynucleotide programmable nucleotide binding domain is a polynucleotide programmable DNA binding domain. In some embodiments, the polynucleotide programmable nucleotide binding domain is a polynucleotide programmable RNA binding domain. In some embodiments, the polynucleotide programmable nucleotide binding domain is a Cas9 protein. A Cas9 protein can associate with a guide RNA that guides the Cas9 protein to a specific DNA sequence that is complementary to the guide RNA. In some embodiments, the napDNAbp is a Cas9 domain, for example a nuclease active Cas9, a Cas9 nickase (nCas9), or a nuclease inactive Cas9 (dCas9). Non-limiting examples of nucleic acid programmable DNA binding proteins include, Cas9 (e.g., dCas9 and nCas9), Cas12a/Cpf1, Cas12b/C2cl, Cas12c/C2c3, Cas12d/CasY, Cas12e/CasX, Cas12g, Cas12h, Cas12i, and Cas12j/CasΦ (Cas12j/Casphi). Non-limiting examples of Cas enzymes include Cas1, Cas1B, Cas2, Cas3, Cas4, Cas5, Cas5d, Cas5t, Cas5h, Cas5a, Cas6, Cas7, Cas8, Cas8a, Cas8b, Cas8c, Cas9 (also known as Csn1 or Csx12), Cas10, Cas10d, Cas12a/Cpf1, Cas12b/C2cl, Cas12c/C2c3, Cas12d/CasY, Cas12e/CasX, Cas12g, Cas12h, Cas12i, Cas12j/CasΦ, Cpf1, Csy1, Csy2, Csy3, Csy4, Cse1, Cse2, Cse3, Cse4, Cse5e, Csc1, Csc2, Csa5, Csn1, Csn2, Csm1, Csm2, Csm3, Csm4, Csm5, Csm6, Cmr1, Cmr3, Cmr4, Cmr5, Cmr6, Csb1, Csb2, Csb3, Csx17, Csx14, Csx10, Csx16, CsaX, Csx3, Csx1, Csx1S, Csx11, Csf1, Csf2, CsO, Csf4, Csd1, Csd2, Cst1, Cst2, Csh1, Csh2, Csa1, Csa2, Csa3, Csa4, Csa5, Type II Cas effector proteins, Type V Cas effector proteins, Type VI Cas effector proteins, CARF, DinG, homologues thereof, or modified or engineered versions thereof. Other nucleic acid programmable DNA binding proteins are also within the scope of this disclosure, although they may not be specifically listed in this disclosure. See, e.g., Makarova et al. “Classification and Nomenclature of CRISPR-Cas Systems: Where from Here?” CRISPR J. 2018 October; 1:325-336. doi: 10.1089/crispr.2018.0033; Yan et al., “Functionally diverse type V CRISPR-Cas systems” Science. 2019 Jan. 4; 363(6422):88-91. doi: 10.1126/science.aav7271, the entire contents of each are hereby incorporated by reference. Exemplary nucleic acid programmable DNA binding proteins and nucleic acid sequences encoding nucleic acid programmable DNA binding proteins are provided in the Sequence Listing as SEQ ID NOs: 223, 230-232, 235-242, 246-256, and 285-294.

[0084] The terms “nucleobase editing domain” or “nucleobase editing protein,” as used herein, refers to a protein or enzyme that can catalyze a nucleobase modification in RNA or DNA, such as cytosine (or cytidine) to uracil (or uridine) orthymine (orthymidine), and adenine (or adenosine) to hypoxanthine (or inosine) deaminations, as well as non-templated nucleotide additions and insertions. In some embodiments, the nucleobase editing domain is a deaminase domain (e.g., an adenine deaminase or an adenosine deaminase; or a cytidine deaminase or a cytosine deaminase).

[0085] As used herein, “obtaining” as in “obtaining an agent” includes synthesizing, purchasing, or otherwise acquiring the agent.

[0086] A “patient” or “subject” as used herein refers to a mammalian subject or individual diagnosed with, at risk of having or developing, or suspected of having or developing a disease or a disorder. In some embodiments, the term “patient” refers to a mammalian subject with a higher than average likelihood of developing a disease or a disorder. Exemplary patients can be humans, non-human primates, cats, dogs, pigs, cattle, cats, horses, camels, llamas, goats, sheep, rodents (e.g., mice, rabbits, rats, or guinea pigs) and other mammalians that can benefit from the therapies disclosed herein. Exemplary human patients can be male and/or female.

[0087] “Patient in need thereof” or “subject in need thereof” is referred to herein as a patient diagnosed with, at risk or having, predetermined to have, or suspected of having a disease or disorder.

[0088] The terms “pathogenic mutation”, “pathogenic variant”, “disease casing mutation”, “disease causing variant”, “deleterious mutation”, or “predisposing mutation” refers to a genetic alteration or mutation that increases an individual's susceptibility or predisposition to a certain disease or disorder. In some embodiments, the pathogenic mutation comprises at least one wild-type amino acid substituted by at least one pathogenic amino acid in a protein encoded by a gene.

[0089] The terms “protein”, “peptide”, “polypeptide”, and their grammatical equivalents are used interchangeably herein, and refer to a polymer of amino acid residues linked together by peptide (amide) bonds. A protein, peptide, or polypeptide can be naturally occurring, recombinant, or synthetic, or any combination thereof.

[0090] The term “fusion protein” as used herein refers to a hybrid polypeptide which comprises protein domains from at least two different proteins.

[0091] The term “recombinant” as used herein in the context of proteins or nucleic acids refers to proteins or nucleic acids that do not occur in nature, but are the product of human engineering.

[0092] For example, in some embodiments, a recombinant protein or nucleic acid molecule comprises an amino acid or nucleotide sequence that comprises at least one, at least two, at least three, at least four, at least five, at least six, or at least seven mutations as compared to any naturally occurring sequence.

[0093] By “reduces” is meant a negative alteration of at least 10%, 25%, 50%, 75%, or 100%.

[0094] A “reference sequence” is a defined sequence used as a basis for sequence comparison. A reference sequence may be a subset of or the entirety of a specified sequence; for example, a segment of a full-length cDNA or gene sequence, or the complete cDNA or gene sequence. For polypeptides, the length of the reference polypeptide sequence will generally be at least about 16 amino acids, at least about 20 amino acids, at least about 25 amino acids, about 35 amino acids, about 50 amino acids, or about 100 amino acids. For nucleic acids, the length of the reference nucleic acid sequence will generally be at least about 50 nucleotides, at least about 60 nucleotides, at least about 75 nucleotides, about 100 nucleotides or about 300 nucleotides or any integer thereabout or therebetween. In some embodiments, a reference sequence is a wild-type sequence of a protein of interest. In other embodiments, a reference sequence is a polynucleotide sequence encoding a wild-type protein.

[0095] The term “RNA-programmable nuclease,” and “RNA-guided nuclease” are used with (e.g., binds or associates with) one or more RNA(s) that is not a target for cleavage. In some embodiments, an RNA-programmable nuclease, when in a complex with an RNA, may be referred to as a nuclease:RNA complex. Typically, the bound RNA(s) is referred to as a guide RNA (gRNA). In some embodiments, the RNA-programmable nuclease is the (CRISPR-associated system) Cas9 endonuclease, for example, Cas9 (Csnl) from Streptococcus pyogenes.

[0096] The term “single nucleotide polymorphism (SNP)” is a variation in a single nucleotide that occurs at a specific position in the genome, where each variation is present to some appreciable degree within a population (e.g., >1%).

[0097] By “specifically binds” is meant a nucleic acid molecule, polypeptide, polypeptide/polynucleotide complex, compound, or molecule that recognizes and binds a polypeptide and/or nucleic acid molecule of the invention, but which does not substantially recognize and bind other molecules in a sample, for example, a biological sample.

[0098] By “substantially identical” is meant a polypeptide or nucleic acid molecule exhibiting at least 50% identity to a reference amino acid sequence. In one embodiment, a reference sequence is a wild-type amino acid or nucleic acid sequence. In another embodiment, a reference sequence is any one of the amino acid or nucleic acid sequences described herein. In one embodiment, such a sequence is at least 60%, 80%, 85%, 90%, 95% or even 99% identical at the amino acid level or nucleic acid level to the sequence used for comparison.

[0099] Sequence identity is typically measured using sequence analysis software (for example, Sequence Analysis Software Package of the Genetics Computer Group, University of Wisconsin Biotechnology Center, 1710 University Avenue, Madison, Wis. 53705, BLAST, BESTFIT, GAP, or PILEUP/PRETTYBOX programs). Such software matches identical or similar sequences by assigning degrees of homology to various substitutions, deletions, and/or other modifications. Conservative substitutions typically include substitutions within the following groups: glycine, alanine; valine, isoleucine, leucine; aspartic acid, glutamic acid, asparagine, glutamine; serine, threonine; lysine, arginine; and phenylalanine, tyrosine. In an exemplary approach to determining the degree of identity, a BLAST program may be used, with a probability score between e⁻³ and e⁻¹⁰⁰ indicating a closely related sequence.

[0100] COBALT is used, for example, with the following parameters:

[0101] a) alignment parameters: Gap penalties-11,−1 and End-Gap penalties-5,−1,

[0102] b) CDD Parameters: Use RPS BLAST on; Blast E-value 0.003; Find Conserved columns and Recompute on, and

[0103] c) Query Clustering Parameters: Use query clusters on; Word Size 4; Max cluster distance 0.8; Alphabet Regular.

[0104] EMBOSS Needle is used, for example, with the following parameters:

[0105] a) Matrix: BLOSUM62;

[0106] b) GAP OPEN: 10;

[0107] c) GAP EXTEND: 0.5;

[0108] d) OUTPUT FORMAT: pair;

[0109] e) END GAP PENALTY: false;

[0110] f) END GAP OPEN: 10; and

[0111] g) END GAP EXTEND: 0.5.

[0112] Nucleic acid molecules useful in the methods of the invention include any nucleic acid molecule that encodes a polypeptide of the invention or a fragment thereof. Such nucleic acid molecules need not be 100% identical with an endogenous nucleic acid sequence, but will typically exhibit substantial identity. Polynucleotides having “substantial identity” to an endogenous sequence are typically capable of hybridizing with at least one strand of a double-stranded nucleic acid molecule. Nucleic acid molecules useful in the methods of the invention include any nucleic acid molecule that encodes a polypeptide of the invention or a fragment thereof. Such nucleic acid molecules need not be 100% identical with an endogenous nucleic acid sequence, but will typically exhibit substantial identity. Polynucleotides having “substantial identity” to an endogenous sequence are typically capable of hybridizing with at least one strand of a double-stranded nucleic acid molecule. By “hybridize” is meant pair to form a double-stranded molecule between complementary polynucleotide sequences (e.g., a gene described herein), or portions thereof, under various conditions of stringency. (See, e.g., Wahl, G. M. and S. L. Berger (1987) Methods Enzymol. 152:399; Kimmel, A. R. (1987) Methods Enzymol. 152:507).

[0113] For example, stringent salt concentration will ordinarily be less than about 750 mM NaCl and 75 mM trisodium citrate, preferably less than about 500 mM NaCl and 50 mM trisodium citrate, and more preferably less than about 250 mM NaCl and 25 mM trisodium citrate. Low stringency hybridization can be obtained in the absence of organic solvent, e.g., formamide, while high stringency hybridization can be obtained in the presence of at least about 35% formamide, and more preferably at least about 50% formamide. Stringent temperature conditions will ordinarily include temperatures of at least about 30° C., more preferably of at least about 37° C., and most preferably of at least about 42° C. Varying additional parameters, such as hybridization time, the concentration of detergent, e.g., sodium dodecyl sulfate (SDS), and the inclusion or exclusion of carrier DNA, are well known to those skilled in the art. Various levels of stringency are accomplished by combining these various conditions as needed. In a preferred: embodiment, hybridization will occur at 30° C. in 750 mM NaCl, 75 mM trisodium citrate, and 1% SDS. In a more preferred embodiment, hybridization will occur at 37° C. in 500 mM NaCl, 50 mM trisodium citrate, 1% SDS, 35% formamide, and 100 μg/ml denatured salmon sperm DNA (ssDNA). In a most preferred embodiment, hybridization will occur at 42° C. in 250 mM NaCl, 25 mM trisodium citrate, 1% SDS, 50% formamide, and 200 μg/ml ssDNA. Useful variations on these conditions will be readily apparent to those skilled in the art.

[0114] For most applications, washing steps that follow hybridization will also vary in stringency. Wash stringency conditions can be defined by salt concentration and by temperature. As above, wash stringency can be increased by decreasing salt concentration or by increasing temperature. For example, stringent salt concentration for the wash steps will preferably be less than about 30 mM NaCl and 3 mM trisodium citrate, and most preferably less than about 15 mM NaCl and 1.5 mM trisodium citrate. Stringent temperature conditions for the wash steps will ordinarily include a temperature of at least about 25° C., more preferably of at least about 42° C., and even more preferably of at least about 68° C. In an embodiment, wash steps will occur at 25° C. in 30 mM NaCl, 3 mM trisodium citrate, and 0.1% SDS. In another embodiment, wash steps will occur at 42 C in 15 mM NaCl, 1.5 mM trisodium citrate, and 0.1% SDS. In a more preferred embodiment, wash steps will occur at 68° C. in 15 mM NaCl, 1.5 mM trisodium citrate, and 0.1% SDS. Additional variations on these conditions will be readily apparent to those skilled in the art. Hybridization techniques are well known to those skilled in the art and are described, for example, in Benton and Davis (Science 196:180, 1977); Grunstein and Hogness (Proc. Natl. Acad. Sci., USA 72:3961, 1975); Ausubel et al. (Current Protocols in Molecular Biology, Wiley Interscience, New York, 2001); Berger and Kimmel (Guide to Molecular Cloning Techniques, 1987, Academic Press, New York); and Sambrook et al., Molecular Cloning: A Laboratory Manual, Cold Spring Harbor Laboratory Press, New York.

[0115] By “split” is meant divided into two or more fragments.

[0116] A “split Cas9 protein” or “split Cas9” refers to a Cas9 protein that is provided as an N-terminal fragment and a C-terminal fragment encoded by two separate nucleotide sequences. The polypeptides corresponding to the N-terminal portion and the C-terminal portion of the Cas9 protein may be spliced to form a “reconstituted” Cas9 protein.

[0117] The term “target site” refers to a sequence within a nucleic acid molecule that is deaminated by a deaminase (e.g., cytidine or adenine deaminase) or a fusion protein comprising a deaminase (e.g., a dCas9-adenosine deaminase fusion protein or a base editor disclosed herein).

[0118] As used herein, the terms “treat,” treating,” “treatment,” and the like refer to reducing or ameliorating a disorder and/or symptoms associated therewith or obtaining a desired pharmacologic and/or physiologic effect. It will be appreciated that, although not precluded, treating a disorder or condition does not require that the disorder, condition or symptoms associated therewith be completely eliminated. In some embodiments, the effect is therapeutic, i.e., without limitation, the effect partially or completely reduces, diminishes, abrogates, abates, alleviates, decreases the intensity of, or cures a disease and/or adverse symptom attributable to the disease. In some embodiments, the effect is preventative, i.e., the effect protects or prevents an occurrence or reoccurrence of a disease or condition. To this end, the presently disclosed methods comprise administering a therapeutically effective amount of a compositions as described herein.

[0119] By “uracil glycosylase inhibitor” or “UGI” is meant an agent that inhibits the uracil-excision repair system. Base editors comprising a cytidine deaminase convert cytosine (e.g., cytosine in DNA) to uracil, which is then converted to thymine through DNA replication or repair. Including an inhibitor of uracil DNA glycosylase (UGI) in the base editor prevents base excision repair which changes the U back to a C. An exemplary UGI comprises an amino acid sequence as follows:

>sp|P14739|UNGI_BPPB2 Uracil-DNA glycosylase
inhibitor
(SEQ ID NO: 106)
MTNLSDIIEKETGKQLVIQESILMLPEEVEEVIGNKPESDILVHTAYDES
TDENVMLLTSDAPEYKPWALVIQDSNGENKIKML.

[0120] Ranges provided herein are understood to be shorthand for all of the values within the range. For example, a range of 1 to 50 is understood to include any number, combination of numbers, or sub-range from the group consisting 1, 2, 3, 4, 5, 6, 7, 8, 9, 10, 11, 12, 13, 14, 15, 16, 17, 18, 19, 20, 21, 22, 23, 24, 25, 26, 27, 28, 29, 30, 31, 32, 33, 34, 35, 36, 37, 38, 39, 40, 41, 42, 43, 44, 45, 46, 47, 48, 49, or 50.

[0121] The recitation of a listing of chemical groups in any definition of a variable herein includes definitions of that variable as any single group or combination of listed groups. The recitation of an embodiment for a variable or aspect herein includes that embodiment as any single embodiment or in combination with any other embodiments or portions thereof.

[0122] All terms are intended to be understood as they would be understood by a person skilled in the art. Unless defined otherwise, all technical and scientific terms used herein have the same meaning as commonly understood by one of ordinary skill in the art to which the disclosure pertains.

[0123] In this application, the use of the singular includes the plural unless specifically stated otherwise. It must be noted that, as used in the specification, the singular forms “a,” “an” and “the” include plural referents unless the context clearly dictates otherwise. In this application, the use of “or” means “and/or” unless stated otherwise. Furthermore, use of the term “including” as well as other forms, such as “include”, “includes,” and “included,” is not limiting.

[0124] As used in this specification and claim(s), the words “comprising” (and any form of comprising, such as “comprise” and “comprises”), “having” (and any form of having, such as “have” and “has”), “including” (and any form of including, such as “includes” and “include”) or “containing” (and any form of containing, such as “contains” and “contain”) are inclusive or open-ended and do not exclude additional, unrecited elements or method steps. It is contemplated that any embodiment discussed in this specification can be implemented with respect to any method or composition of the present disclosure, and vice versa. Furthermore, compositions of the present disclosure can be used to achieve methods of the present disclosure.

[0125] The term “about” or “approximately” means within an acceptable error range for the particular value as determined by one of ordinary skill in the art, which will depend in part on how the value is measured or determined, i.e., the limitations of the measurement system. For example, “about” can mean within 1 or more than 1 standard deviation, per the practice in the art. Alternatively, “about” can mean a range of up to 20%, up to 10%, up to 5%, or up to 1% of a given value. Alternatively, particularly with respect to biological systems or processes, the term can mean within an order of magnitude, e.g., within 5-fold, within 2-fold of a value. Where particular values are described in the application and claims, unless otherwise stated, the term “about” means within an acceptable error range for the particular value should be assumed.

[0126] Reference in the specification to “certain embodiments,” “some embodiments,” “an embodiment,” “one embodiment” or “other embodiments” means that a particular feature, structure, or characteristic described in connection with the embodiments is included in at least some embodiments, but not necessarily all embodiments, of the present disclosures.

### B. Pseudotyped Recombinant Lyssaviruses

[0127] Provided herein are pseudotyped recombinant lyssavirus particles that are useful for transducing a target cell. In one aspect, a pseudotyped lyssavirus particle of the present disclosure comprises a recombinant lyssavirus genome, wherein the recombinant lyssavirus genome comprises a nucleic acid comprising a therapeutic transgene. As such, pseudotyped lyssavirus particles of the present disclosure can be employed in a method for transducing a target cell. Upon transduction of a target cell, the transgene comprised within the recombinant lyssavirus genome is expressed and a transgene product is produced. While lyssavirus particles have a natural tropism for neuronal cell types, the pseudotyped recombinant lyssavirus particles described herein adopt the tropism of the pseudotyping (i.e., heterologous) envelope protein. As such, the pseudotyped recombinant lyssavirus particles described herein can exhibit tropism for neuronal as well as non-neuronal cell types, and find use in delivering a transgene to a wide variety of cell types.

[0128] As used herein, the term “lyssavirus” refers to a genus of negative sense single stranded RNA viruses belonging to the rhabdoviridae family. Lyssavirus particles are enveloped viruses with a cylindrical morphology, about 75 nm wide and about 180 nm long. The structure includes a lipoprotein envelope composed of glygoprotein G surrounding a helical ribonucleoprotein core. The lyssavirus genome contains five genes that encode for proteins that promote transcription and replication of the genome and proteins that make up the structural components of the virus. The five genes are: the N gene encoding for a lyssavirus nucleoprotein; the P gene encoding for a lyssavirus phosphoprotein; the M gene encoding for a lyssavirus matrix protein; the G gene encoding for a lyssavirus envelope protein (also known as the glycoprotein); and the L gene encoding for a lyssavirus polymerase. Viral genome RNA and the nucleoprotein together form a ribonucleoprotein that functions as a template for replication and transcription by the lyssavirus polymerase (an RNA-dependent RNA polymerase). Exemplary lyssaviruses include, but are not limited to, rabies virus (RABV), mokola virus (MOKV), duvenhage virus (DUVV), lagos bat virus (LBV), and west caucasian bat virus (WCBV).

[0129] In certain embodiments, the pseudotyped recombinant lyssavirus particle is a pseudotyped recombinant rabies virus particle.

[0130] Also known as Rabies lyssavirus, rabies virus is a negative sense single stranded RNA virus of the Lyssavirus genus of the Rhabdoviridae family. Rabies virus has a cylindrical morphology, and the structure includes a lipoprotein envelope composed of envelope protein G surrounding a helical ribonucleoprotein core. Like other lyssaviruses, the rabies virus genome contains five genes that encode for proteins that promote transcription and replication of the genome and proteins that make up the structural components of the virus. The five genes are: the N gene encoding for a rabies virus nucleoprotein; the P gene encoding for a rabies virus phosphoprotein; the M gene encoding for a rabies virus matrix protein; the G gene encoding for a rabies virus envelope protein (also known as the glycoprotein); and the L gene encoding for a rabies virus polymerase. Viral genome RNA and the nucleoprotein together form a ribonucleoprotein that functions as a template for replication and transcription by the rabies virus polymerase (an RNA-dependent RNA polymerase).

[0131] In certain embodiments, the recombinant lyssavirus genome (e.g., recombinant rabies virus genome) does not encode a envelope protein or a functional variant thereof (i.e., the G gene is absent from the recombinant lyssavirus genome). Recombinant lyssavirus genomes that lack a G gene encoding for a lyssavirus envelope protein prevents the virus from being able to endogenously produce envelope protein. Because the envelope protein is only required for the final steps of the viral life cycle, this deletion prevents the virus from spreading beyond initially infected cells, but it does not prevent the virus from completing the entirety of its replication cycle up to that point.

[0132] In certain embodiments, a recombinant lyssavirus genome (e.g., recombinant rabies virus genome) of the present disclosure has one or more additional lyssavirus genes removed. For example, the N gene, the P gene, the M gene, and/or the L gene may be absent from the recombinant lyssavirus genome. In certain embodiments, the recombinant lyssavirus genome (e.g., rabies virus genome) lacks an L gene encoding for a lyssavirus polymerase or a functional variant thereof. The L gene product is required both for transcription of viral genes and for replication of the viral genome, and deletion of the L gene may result in less cytotoxicity of a target transduced cell. See, e.g., Chatterjee et al., Nat. Neurosci. (2018) 21(4): 638-646, the disclosure of which is herein incorporated by reference in its entirety. In certain embodiments, the recombinant lyssavirus genome (e.g., rabies virus genome) lacks a G gene encoding for a lyssavirus envelope protein or a functional variant thereof (e.g., rabies virus envelope protein or a functional variant thereof), and lacks an L gene encoding for a lyssavirus polymerase or a functional variant thereof (e.g., rabies virus polymerase or a functional variant thereof).

[0133] It is readily appreciated by those of ordinary skill in the art that a recombinant lyssavirus genome (e.g., rabies virus genome) that lacks a lyssavirus gene, as described herein, refers to a lyssavirus genome that lacks all or a portion of the lyssavirus gene. For example, a recombinant lyssavirus genome that lacks a G gene may lack all or a portion of the G gene, wherein the portion of the G gene is required for the function of the G gene product. In certain embodiments, lacking a portion of the G gene that is required for the function of the G gene product may result in the production of a truncated, non-functional envelope protein. In certain embodiments, a recombinant lyssavirus genome that lacks an L gene may lack all or a portion of the L gene, wherein the portion of the L gene is required for the function of the L gene product. In certain embodiments, lacking a portion of the L gene that is required for the function of the L gene product may result in the production of a truncated, non-functional RNA-dependent RNA polymerase.

[0134] In certain embodiments, a recombinant lyssavirus genome (e.g., rabies virus genome) of the present disclosure encodes a nucleic acid comprising a transgene (e.g., a therapeutic transgene). In certain embodiments, the nucleic acid comprising a transgene replaces the one or more lyssavirus genes that are removed, as described herein. For example, the nucleic acid comprising a transgene may replace all or a portion of a lyssavirus gene. In certain embodiments, the nucleic acid comprising a transgene replaces all or a portion of a G gene, wherein the portion of the G gene is required for the function of the G gene product. In certain embodiments, the nucleic acid comprising a transgene replaces all or a portion of an L gene, wherein the portion of the L gene is required for the function of the L gene product. In certain embodiments, the nucleic acid comprising a transgene replaces all or a portion of an L gene, wherein the portion of the L gene is required for the function of the L gene product; and all or a portion of a G gene, wherein the portion of the G gene is required for the function of the G gene product.

[0135] In certain embodiments, a recombinant lyssavirus genome (e.g., rabies virus genome) of the present disclosure encodes a nucleic acid comprising a transgene, wherein the transgene replaces the one or more lyssavirus genes that are removed, as described herein. In certain embodiments, the recombinant lyssavirus genome (e.g., rabies virus genome) comprises an N gene encoding for a lyssavirus nucleoprotein or a functional variant thereof (e.g., rabies virus nucleoprotein or a functional variant thereof), a P gene encoding for a lyssavirus phosphoprotein or a functional variant thereof (e.g., rabies virus phosphoprotein or a functional variant thereof), and/or an M gene encoding for a lyssavirus matrix protein or a functional variant thereof (e.g., rabies virus matrix protein or a functional variant thereof).

[0136] As used herein, the term “heterologous envelope protein” refers to a envelope protein from a virus that is different from the natural envelope protein of the lyssavirus particle (i.e., the envelope protein that is encoded by the lyssavirus genome). By way of example, but in no way limiting, a pseudotyped recombinant rabies virus particle comprises a heterologous envelope protein that is from any virus other than rabies virus (e.g., a pseudotyped recombinant rabies virus particle comprising a sindbis virus (SINV) envelope protein, a semliki forest virus (SFV) envelope protein, a chikungunya virus (CHIKV) envelope protein, a Mayaro virus (MAYV) envelope protein, an o'nyong'nyong virus (ONNV) envelope protein, a Ross River virus (RRV) envelope protein, western equine encephalitis virus (WEEV) envelope protein, an eastern equine encephalitis virus (EEEV) envelope protein, a Venezuelan equine encephalitis virus (VEEV) envelope protein, an ekpoma virus 1 (EKV-1) envelope protein, an ekpoma virus 2 (EKV-2) envelope protein, a hepatitis C virus (HCV) envelope protein, a human pegivirus type 1 (HPgV-1) envelope protein, a human pegivirus type 2 (HPgV-2) envelope protein, a zika virus (ZIKV) envelope protein, a marburg virus (MARV) envelope protein, a nipah/hendra virus (NIV) envelope protein, or a baboon endogenous retrovirus (BAEV) envelope protein. In certain embodiments, the heterologous envelope protein includes a variant of a natural envelope protein that is at least 95%, 90%, 85%, 80%, 75%, 70%, 65%, 60%, 55%, 50%, 45%, 40%, 35%, 30%, or less identical (but not 100% identical) thereto. In certain embodiments, the heterologous envelope protein includes a variant of a natural envelope protein no more than 95%, 90%, 85%, 80%, 75%, 70%, 65%, 60%, 55%, 50%, 45%, 40%, 35%, 30%, or less identical thereto.

### Togaviridae Family Heterologous Envelope Proteins

[0137] In certain embodiments, the heterologous envelope protein is a envelope protein of a virus in the Togaviridae family. The Togaviridae family comprises a single genus, the alphavirus genus. Alphaviruses belong to group IV of the Baltimore classification of viruses, with a positive-sense, single-stranded RNA genome. Alphavirus particles are enveloped with a 70 nm diameter. The envelope protein is composed of a P62 protein and E1 protein. The P62 protein may undergo proteolytic maturation to form an E2 and E3 protein. The final envelope protein is a E1/E2 heterodimer or E1/E2/E3 heterotrimer.

[0138] In certain embodiments, the Togaviridae family is an alphavirus. In certain embodiments, the alphavirus is selected from the group consisting of: a sindbis virus (SINV), a semliki forest virus (SFV), a chikungunya virus (CHIKV), a Mayaro virus (MAYV), an o'nyong'nyong virus (ONNV), a Ross River virus (RRV), and an equine encephalitis virus (EEV). In certain embodiments, the EEV is selected from the group consisting of: a western equine encephalitis virus (WEEV), an eastern equine encephalitis virus (EEEV), and a Venezuelan equine encephalitis virus (VEEV).

[0139] In certain embodiments, the pseudotyped recombinant lyssavirus particle comprises a SINV envelope protein. In certain embodiments, the pseudotyped recombinant lyssavirus particle comprises a SFV envelope protein. In certain embodiments, the pseudotyped recombinant lyssavirus particle comprises a CHIKV envelope protein. In certain embodiments, the pseudotyped recombinant lyssavirus particle comprises a strain 37997 CHIKV envelope protein. In certain embodiments, the pseudotyped recombinant lyssavirus particle comprises a MAYV envelope protein. In certain embodiments, the pseudotyped recombinant lyssavirus particle comprises a strain Beh407 MAYV envelope protein. In certain embodiments, the pseudotyped recombinant lyssavirus particle comprises a ONNV envelope protein. In certain embodiments, the pseudotyped recombinant lyssavirus particle comprises a strain MP30 ONNV envelope protein. In certain embodiments, the pseudotyped recombinant lyssavirus particle comprises a RRV envelope protein. In certain embodiments, the pseudotyped recombinant lyssavirus particle comprises a strain RRV6 RRV envelope protein. In certain embodiments, the pseudotyped recombinant lyssavirus particle comprises a EEV envelope protein. In certain embodiments, the pseudotyped recombinant lyssavirus particle comprises a WEEV envelope protein. In certain embodiments, the pseudotyped recombinant lyssavirus particle comprises a strain CBA83 WEEV envelope protein. In certain embodiments, the pseudotyped recombinant lyssavirus particle comprises a EEEV envelope protein. In certain embodiments, the pseudotyped recombinant lyssavirus particle comprises a strain Pe6 EEEV envelope protein. In certain embodiments, the pseudotyped recombinant lyssavirus particle comprises a VEEV envelope protein. In certain embodiments, the pseudotyped recombinant lyssavirus particle comprises a strain Tc83 VEEV envelope protein.

[0140] In certain embodiments, the heterologous envelope protein of the Togaviridae family includes a variant of a natural Togaviridae envelope protein that is at least 95%, 90%, 85%, 80%, 75%, 70%, 65%, 60%, 55%, 50%, 45%, 40%, 35%, 30%, or less identical (but not 100% identical) thereto. In certain embodiments, the heterologous envelope protein includes a variant of a natural Togaviridae envelope protein no more than 95%, 90%, 85%, 80%, 75%, 70%, 65%, 60%, 55%, 50%, 45%, 40%, 35%, 30%, or less identical thereto.

### Rhabdoviridae Family Heterologous Envelope Proteins

[0141] In certain embodiments, the heterologous envelope protein is a envelope protein of a virus in the Rhabdoviridae family. The Rhabdoviridae family comprises several genera, including lyssavirus, tibrovirus, vesiculovirus, ephemerovirus, novirhabdovirus, perhabdovirus, sigmavirus, sprivivirus, and tupavirus. Rhabdoviruses belong to group V of the Baltimore classification of viruses, with a negative-sense, single-stranded RNA genome. The rhabdoviruses have a cylindrical morphology of about 75 nm wide and about 180 nm long.

[0142] In certain embodiments, the heterologous envelope protein is a envelope protein of a lyssavirus. In certain embodiments, the lyssavirus is selected from the group consisting of: a rabies virus (RABV), a mokola virus (MOKV), duvenhage virus (DUVV), lagos bat virus (LBV), and west caucasian bat virus (WCBV). In certain embodiments, the pseudotyped recombinant lyssavirus particle comprises a RABV envelope protein. In certain embodiments, the pseudotyped recombinant lyssavirus particle comprises a MOKV envelope protein.

[0143] In certain embodiments, the heterologous envelope protein is a envelope protein of a vesiculovirus. In certain embodiments, the vesiculovirus is selected from the group consisting of: a vesicular stomatitis virus (VSV), a chandipura virus (CHPV), a cocal virus (COCV), a isfahan virus (ISFV), a maraba virus (MARAV), and a piry virus (PIRYV). In certain embodiments, the pseudotyped recombinant lyssavirus particle comprises a VSV envelope protein. In certain embodiments, the pseudotyped recombinant lyssavirus particle comprises a COCV envelope protein.

[0144] In certain embodiments, the heterologous envelope protein is a envelope protein of a tibrovirus. In certain embodiments, the tibrovirus is selected from the group consisting of: an ekpoma virus (EKV), a bas-Congo virus (BASV), a beatrice Hill virus (BHV), a bivens arm virus (BAV), a bovine fever ephemeral virus (BEFV), a coastal Plains virus (CPV), a sweetwater branch virus (SWBV), and a tibrogargan virus (TIBV). In certain embodiments, the ekpoma virus is ekpoma virus 1 (EKV-1) or ekpoma virus 2 (EKV-2). In certain embodiments, the pseudotyped recombinant lyssavirus particle comprises a EKV-1 envelope protein. In certain embodiments, the pseudotyped recombinant lyssavirus particle comprises a EKV-2 envelope protein.

[0145] In certain embodiments, the heterologous envelope protein of the Rhabdoviridae family includes a variant of a natural Rhabdoviridae envelope protein that is at least 95%, 90%, 85%, 80%, 75%, 70%, 65%, 60%, 55%, 50%, 45%, 40%, 35%, 30%, or less identical (but not 100% identical) thereto. In certain embodiments, the heterologous envelope protein includes a variant of a natural Rhabdoviridae envelope protein no more than 95%, 90%, 85%, 80%, 75%, 70%, 65%, 60%, 55%, 50%, 45%, 40%, 35%, 30%, or less identical thereto.

### Flaviviridae Family Heterologous Envelope Proteins

[0146] In certain embodiments, the heterologous envelope protein is a envelope protein of a virus in the Flaviviridae family. The Flaviviridae family comprises several genera, including hepacivirus, flavivirus, pegivirus, and pestivirus. Flaviviruses belong to group IV of the Baltimore classification of viruses, with a positive-sense, single-stranded RNA genome. The flaviviruses have a spherical morphology of about 40 nm to about 70 nm wide.

[0147] In certain embodiments, the heterologous envelope protein is a envelope protein of a hepacivirus. In certain embodiments, the hepacivirus is a hepatitis C virus (HCV).

[0148] In certain embodiments, the heterologous envelope protein is a envelope protein of a flavivirus. In certain embodiments, the flavivirus is selected from the group consisting of: a Dengue virus (DENV), a Gadgets Gully virus (GGYV), a Japanese encephalitis virus (JEV), a Kadam virus (KAD), a Kyasanur forest disease (KFD), a Langat virus (LGTV), a Modoc virus (MODV), a Murray Valley encephalitis virus (MVEV), a Omsk hemorrhagic fever virus (OHFV), a Powassan virus (POWV), a Sepik virus (SEPV), a Tick-borne encephalitis virus (TBEV), a Usutu virus (USUV), a Wesselsbron virus (WSL), a West Nile virus (WNV), a Yellow fever virus (YFV), a Yokose virus (YOKV), and a Zika virus (ZIKV).

[0149] In certain embodiments, the pseudotyped recombinant lyssavirus particle comprises a DENV envelope protein. In certain embodiments, the pseudotyped recombinant lyssavirus particle comprises a WNV envelope protein. In certain embodiments, the pseudotyped recombinant lyssavirus particle comprises a YFV envelope protein. In certain embodiments, the pseudotyped recombinant lyssavirus particle comprises a ZIKV envelope protein.

[0150] In certain embodiments, the heterologous envelope protein is a envelope protein of a pegivirus. In certain embodiments, the pegivirus is a human pegivirus type 1 (HPgV-1) or a human pegivirus type 2 (HPgV-2). In certain embodiments, the pseudotyped recombinant lyssavirus particle comprises a HPgV-1 envelope protein. In certain embodiments, the pseudotyped recombinant lyssavirus particle comprises a HPgV-2 envelope protein.

[0151] In certain embodiments, the heterologous envelope protein of the Flaviviridae family includes a variant of a natural Flaviviridae envelope protein that is at least 95%, 90%, 85%, 80%, 75%, 70%, 65%, 60%, 55%, 50%, 45%, 40%, 35%, 30%, or less identical (but not 100% identical) thereto. In certain embodiments, the heterologous envelope protein includes a variant of a natural Flaviviridae envelope protein no more than 95%, 90%, 85%, 80%, 75%, 70%, 65%, 60%, 55%, 50%, 45%, 40%, 35%, 30%, or less identical thereto.

### Filoviridae Family Heterologous Envelope Proteins

[0152] In certain embodiments, the heterologous envelope protein is a envelope protein of a virus in the Filoviridae family. The Filoviridae family comprises several genera, including cuevavirus, dianlovirus, ebolavirus, and marburgvirus. Filoviruses belong to group V of the Baltimore classification of viruses, with a negative-sense, single-stranded RNA genome.

[0153] In certain embodiments, the heterologous envelope protein is a envelope protein of a cuevavirus. In certain embodiments, the cuevavirus is a Lloviu virus (LLOV).

[0154] In certain embodiments, the heterologous envelope protein is a envelope protein of a dianlovirus. In certain embodiments, the dianlovirus is a Mengla virus (MLAV).

[0155] In certain embodiments, the heterologous envelope protein is a envelope protein of an ebolavirus. In certain embodiments, the ebolavirus is selected from the group consisting of: a Bundibugyo virus (BDBV), a Reston virus (RESTV), a Sudan virus (SUDV), a Tai Forest virus (TAFV), and an Ebola virus (EBOV).

[0156] In certain embodiments, the heterologous envelope protein is a envelope protein of a marburgvirus. In certain embodiments, the marburgvirus is a Marburg virus (MARV) or a Ravn virus (RAVV).

[0157] In certain embodiments, the pseudotyped recombinant lyssavirus particle comprises a EBOV envelope protein. In certain embodiments, the pseudotyped recombinant lyssavirus particle comprises a MARV envelope protein.

[0158] In certain embodiments, the heterologous envelope protein of the Filoviridae family includes a variant of a natural Filoviridae envelope protein that is at least 95%, 90%, 85%, 80%, 75%, 70%, 65%, 60%, 55%, 50%, 45%, 40%, 35%, 30%, or less identical (but not 100% identical) thereto. In certain embodiments, the heterologous envelope protein includes a variant of a natural Filoviridae envelope protein no more than 95%, 90%, 85%, 80%, 75%, 70%, 65%, 60%, 55%, 50%, 45%, 40%, 35%, 30%, or less identical thereto.

Paramyxoviridae Family Heterologous Envelope proteins

[0159] In certain embodiments, the heterologous envelope protein is a envelope protein of a virus in the Paramyxoviridae family. The Paramyxoviridae family comprises several genera, including henipavirus, respirovirus, and rubulavirus. Paramyxoviruses belong to group V of the Baltimore classification of viruses, with a negative-sense, single-stranded RNA genome.

[0160] In certain embodiments, the heterologous envelope protein is a envelope protein of a henipavirus. In certain embodiments, the henipavirus is a Nipah virus (NIV) or a Hendra virus (HEV).

[0161] In certain embodiments, the heterologous envelope protein is a envelope protein of a respirovirus. In certain embodiments, the respirovirus is a Human parainfluenza virus type 1 (HPIV-1) or a Human parainfluenza virus type 3 (HPIV-3).

[0162] In certain embodiments, the heterologous envelope protein is a envelope protein of a rubulavirus. In certain embodiments, the rubulavirus is a Human parainfluenza virus type 2 (HPIV-2) or a Human parainfluenza virus type 4 (HPIV-4).

[0163] In certain embodiments, the heterologous envelope protein of the Paramyxoviridae family includes a variant of a natural Paramyxoviridae envelope protein that is at least 95%, 90%, 85%, 80%, 75%, 70%, 65%, 60%, 55%, 50%, 45%, 40%, 35%, 30%, or less identical (but not 100% identical) thereto. In certain embodiments, the heterologous envelope protein includes a variant of a natural Paramyxoviridae envelope protein no more than 95%, 90%, 85%, 80%, 75%, 70%, 65%, 60%, 55%, 50%, 45%, 40%, 35%, 30%, or less identical thereto.

### Retroviridae Family Heterologous Envelope Proteins

[0164] In certain embodiments, the heterologous envelope protein is an envelope protein of a virus in the Retroviridae family. The Retroviridae family comprises several genera, including lentivirus, alpharetrovirus, betaretrovirus, gammaretrovirus, and deltaretrovirus. Retroviruses belong to group VI of the Baltimore classification of viruses, with a positive-sense, single-stranded RNA genome and a DNA intermediate.

[0165] In certain embodiments, the heterologous envelope protein is an envelope protein of a lentivirus. In certain embodiments, the lentivirus is a human immunodeficiency virus type 1 (HIV-1) or a human immunodeficiency virus type 2 (HIV-2).

[0166] In certain embodiments, the heterologous envelope protein is an envelope protein of a retrovirus. In certain embodiments, the retrovirus is a baboon endogenous retrovirus (BAEV).

[0167] In certain embodiments, the heterologous envelope protein of the Retroviridae family includes a variant of a natural Retroviridae envelope protein that is at least 95%, 90%, 85%, 80%, 75%, 70%, 65%, 60%, 55%, 50%, 45%, 40%, 35%, 30%, or less identical (but not 100% identical) thereto. In certain embodiments, the heterologous envelope protein includes a variant of a natural Retroviridae envelope protein no more than 95%, 90%, 85%, 80%, 75%, 70%, 65%, 60%, 55%, 50%, 45%, 40%, 35%, 30%, or less identical thereto.

[0168] In certain embodiments, the heterologous envelope protein of the Retroviridae family includes a variant of a natural Retroviridae envelope protein that is at least 95%, 90%, 85%, 80%, 75%, 70%, 65%, 60%, 55%, 50%, 45%, 40%, 35%, 30%, or less identical (but not 100% identical) thereto. In certain embodiments, the heterologous envelope protein includes a variant of a natural Retroviridae envelope protein no more than 95%, 90%, 85%, 80%, 75%, 70%, 65%, 60%, 55%, 50%, 45%, 40%, 35%, 30%, or less identical thereto.

[0169] Exemplary nucleic acid sequences of select envelope protein genes, and the amino acid sequence of the gene products thereof are provided in Table 1.

TABLE 1
Sequences of exemplary envelope proteins

| SEQ ID NO: | Sequence |
|---|---|
| SEQ ID NO: | ATGGTTCCTCAGGCTCTCCTGTTTGTACCCCTTCTGGTTTTTCCATTGT |
| 2000 | GTTTTGGGAAATTCCCTATTTACACGATACCAGACAAGCTTGGTCCCT |
| Rabies virus | GGAGTCCGATTGACATACATCACCTCAGCTGCCCAAACAATTTGGTAG |
| RABV G | TGGAGGACGAAGGATGCACCAACCTGTCAGGGTTCTCCTACATGGAA |
| gene | CTTAAAGTTGGATACATCTTAGCCATAAAAGTGAACGGGTTCACTTGC |
| (nucleic | ACAGGCGTTGTGACGGAGGCTGAAACCTACACTAACTTCGTTGGTTAT |
| acid) | GTCACAACCACGTTCAAAAGAAAGCATTTCCGCCCAACACCAGATGCA |
| | TGTAGAGCCGCGTACAACTGGAAGATGGCCGGTGACCCCAGATATGA |
| | AGAGTCTCTACACAATCCGTACCCTGACTACCGCTGGCTTCGAACTGT |
| | AAAAACCACCAAGGAGTCTCTCGTTATCATATCTCCAAGTGTGGCAGA |
| | TTTGGACCCATATGACAGATCCCTTCACTCGAGGGTCTTCCCTAGCGG |
| | GAAGTGCTCAGGAGTAGCGGTGTCTTCTACCTACTGCTCCACTAACCA |
| | CGATTACACCATTTGGATGCCCGAGAATCCGAGACTAGGGATGTCTTG |
| | TGACATTTTTACCAATAGTAGAGGGAAGAGAGCATCCAAAGGGAGTGA |
| | GACTTGCGGCTTTGTAGATGAAAGAGGCCTATATAAGTCTTTAAAAGG |
| | AGCATGCAAACTCAAGTTATGTGGAGTTCTAGGACTTAGACTTATGGA |
| | TGGAACATGGGTCTCGATGCAAACATCAAATGAAACCAAATGGTGCCC |
| | TCCCGATAAGTTGGTGAACCTGCACGACTTTCGCTCAGACGAAATTGA |
| | GCACCTTGTTGTAGAGGAGTTGGTCAGGAAGAGAGAGGAGTGTCTGG |
| | ATGCACTAGAGTCCATCATGACAACCAAGTCAGTGAGTTTCAGACGTC |
| | TCAGTCATTTAAGAAAACTTGTCCCTGGGTTTGGAAAAGCATATACCAT |
| | ATTCAACAAGACCTTGATGGAAGCCGATGCTCACTACAAGTCAGTCAG |
| | AACTTGGAATGAGATCCTCCCTTCAAAAGGGTGTTTAAGAGTTGGGGG |
| | GAGGTGTCATCCTCATGTGAACGGGGTGTTTTTCAATGGTATAATATTA |
| | GGACCTGACGGCAATGTCTTAATCCCAGAGATGCAATCATCCCTCCTC |
| | CAGCAACATATGGAGTTGTTGGAATCCTCGGTTATCCCCCTTGTGCAC |
| | CCCCTGGCAGACCCGTCTACCGTTTTCAAGGACGGTGACGAGGCTGA |
| | GGATTTTGTTGAAGTTCACCTTCCCGATGTGCACAATCAGGTCTCAGG |
| | AGTTGACTTGGGTCTCCCGAACTGGGGGAAGTATGTATTACTGAGTGC |
| | AGGGGCCCTGACTGCCTTGATGTTGATAATTTTCCTGATGACATGTTG |
| | TAGAAGAGTCAATCGATCAGAACCTACGCAACACAATCTCAGAGGGAC |
| | AGGGAGGGAGGTGTCAGTCACTCCCCAAAGCGGGAAGATCATATCTT |
| | CATGGGAATCACACAAGAGTGGGGGTGAGACCAGACTG |
| SEQ ID NO: | MVPQALLFVPLLVFPLCFGKFPIYTIPDKLGPWSPIDIHHLSCPNNLVVEDE |
| 2001 | GCTNLSGFSYMELKVGYILAIKVNGFTCTGVVTEAETYTNFVGYVTTTFKR |
| Rabies virus | KHFRPTPDACRAAYNWKMAGDPRYEESLHNPYPDYRWLRTVKTTKESL |
| RABV G | VIISPSVADLDPYDRSLHSRVFPSGKCSGVAVSSTYCSTNHDYTIWMPEN |
| gene (amino | PRLGMSCDIFTNSRGKRASKGSETCGFVDERGLYKSLKGACKLKLCGVL |
| acid) | GLRLMDGTWVSMQTSNETKWCPPDKLVNLHDFRSDEIEHLVVEELVRKR |
| | EECLDALESIMTTKSVSFRRLSHLRKLVPGFGKAYTIFNKTLMEADAHYKS |
| | VRTWNEILPSKGCLRVGGRCHPHVNGVFFNGIILGPDGNVLIPEMQSSLL |
| | QQHMELLESSVIPLVHPLADPSTVFKDGDEAEDFVEVHLPDVHNQVSGV |
| | DLGLPNWGKYVLLSAGALTALMLIIFLMTCCRRVNRSEPTQHNLRGTGRE |
| | VSVTPQSGKIISSWESHKSGGETRL |
| SEQ ID NO: | ATGTCCGCAGCACCACTGGTCACGGCAATGTGTTTGCTCGGAAATGT |
| 2002 | GAGCTTCCCATGCGACCGCCCGCCCACATGCTATACCCGCGAACCTT |
| Sindbis toto | CCAGAGCCCTCGACATCCTTGAAGAGAACGTGAACCATGAGGCCTAC |
| SINV G | GATACCCTGCTCAATGCCATATTGCGGTGCGGATCGTCTGGCAGCGT |
| gene | CATCGACGACTTTACCCTGACCAGCCCCTACTTGGGCACATGCTCGTA |
| (nucleic | CTGCCACCATACTGAACCGTGCTTCAGCCCTGTTAAGATCGAGCAGGT |
| acid) | CTGGGACGAAGCGGACGATAACACCATACGCATACAGACTTCCGCCC |
| | AGTTTGGATACGACCATAGCGGAGCAGCAAGCGCAAACAAGTACCGC |
| | TACATGGCTGCCGCGGCGGTAACCGACTACAAAGACCATGACGGTGA |
| | TTATAAAGATCATGACATCGATTACAAGGATGACGATGACAAGGGTTC |
| | CGGGGTGCCTACTATCGTGATGGTGGACGCCTACAAGCGTTACAAGG |
| | GTGGTGGCGGTTCGGTAACCACCGTTGCAGCTGGCACCATGGATGAC |
| | ATCAAGATTAGCACCTCAGGACCGTGTAGAAGGCTTAGCTACAAAGGA |
| | TACTTTCTCCTCGCAAAATGCCCTCCAGGGGACAGCGTAACGGTTAGC |
| | ATAGTGAGTAGCAACTCAGCAACGTCATGTACACTGGCCCGCAAGATA |
| | AAACCAAAATTCGTGGGACGGGAAAAATATGATCTACCTCCCGTTCAC |
| | GGTAAAAAAATTCCTTGCACAGTGTACGACCGTCTGAAAGAAACAACT |
| | GCAGGCTACATCACTATGCACAGGCCGGGACCGCACGCTTATACATC |
| | CTACCTGGAAGAATCATCAGGGAAAGTTTACGCAAAGCCGCCATCTG |
| | GGAAGAACATTACGTATGAGTGCAAGTGCGGCGACTACAAGACCGGA |
| | ACCGTTTCGACCCGCACCGAAATCACTGGTTGCACCGCCATCAAGCA |
| | GTGCGTCGCCTATAAGAGCGACCAAACGAAGTGGGTCTTCAACTCAC |
| | CGGACTTGATCAGACATGACGACCACACGGCCCAAGGGAAATTGCAT |
| | TTGCCTTTCAAGTTGATCCCGAGTACCTGCATGGTCCCTGTTGCCCAC |
| | GCGCCGAATGTAATACATGGCTTTAAACACATCAGCCTCCAATTAGAT |
| | ACAGACCACTTGACATTGCTCACCACCAGGAGACTAGGGGCAAACCC |
| | GGAACCAACCACTGAATGGATCGTCGGAAAGACGGTCAGAAACTTCA |
| | CCGTCGACCGAGATGGCCTGGAATACATATGGGGAAATCATGAGCCA |
| | GTGAGGGTCTATGCCCAAGAGTCAGCACCAGGAGACCCTCACGGATG |
| | GCCACACGAAATAGTACAGCATTACTACCATCGCCATCCTGTGTACAC |
| | CATCTTAGCCGTCGCATCAGCTACCGTGGCGATGATGATTGGCGTAA |
| | CTGTTGCAGTGTTATGTGCCTGTAAAGCGCGCCGTGAGTGCCTGACG |
| | CCATACGCCCTGGCCCCAAACGCCGTAATCCCAACTTCGCTGGCACT |
| | CTTGTGCTGCGTTAGGTCGGCCAATGCTGAAACGTTCACCGAGACCA |
| | TGAGTTACTTGTGGTCGAACAGTCAGCCGTTCTTCTGGGTCCAGTTGT |
| | GCATACCTTTGGCCGCTTTCATCGTTCTAATGCGCTGCTGCTCCTGCT |
| | GCCTGCCTTTTTTAGTGGTTGCCGGCGCCTACCTGGCGAAGGTAGAC |
| | GCCTACGAACATGCGACCACTGTTCCAAATGTGCCACAGATACCGTAT |
| | AAGGCACTTGTTGAAAGGGCAGGGTATGCCCCGCTCAATTTGGAGAT |
| | CACTGTCATGTCCTCGGAGGTTTTGCCTTCCACCAACCAAGAGTACAT |
| | TACCTGCAAATTCACCACTGTGGTCCCCTCCCCAAAAATCAAATGCTG |
| | CGGCTCCTTGGAATGTCAGCCGGCCGCTCATGCAGACTATACCTGCA |
| | AGGTCTTCGGAGGGGTCTACCCCTTTATGTGGGGAGGAGCGCAATGT |
| | TTTTGCGACAGTGAGAACAGCCAGATGAGTGAGGCGTACGTCGAATT |
| | GTCAGCAGATTGCGCGTCTGACCACGCGCAGGCGATTAAGGTGCACA |
| | CTGCCGCGATGAAAGTAGGACTGCGTATAGTGTACGGGAACACTACC |
| | AGTTTCCTAGATGTGTACGTGAACGGAGTCACACCAGGAACGTCTAAA |
| | GACTTGAAAGTCATAGCTGGACCAATTTCAGCATCATTTACGCCATTC |
| | GATCATAAGGTCGTTATCCATCGCGGCCTGGTGTACAACTATGACTTC |
| | CCGGAATATGGAGCGATGAAACCAGGAGCGTTTGGAGACATTCAAGC |
| | TACCTCCTTGACTAGCAAGGATCTCATCGCCAGCACAGACATTAGGCT |
| | ACTCAAGCCTTCCTCGGGCAATGTGCATGTCCCGTACACGCAGGCCG |
| | CATCAGGATTTGAGATGTGGAAAAACAACTCAGGCCGCCCATTGCAG |
| | GAAACCGCACCTTTCGGGTGTAAGATTGCAGTAAATCCGCTCCGAGC |
| | GGTGGACTGTTCATACGGGAACATTCCCATTTCTATTGACATCCCGAA |
| | CGCTGCCTTTATCAGGACATCAGATGCACCACTGGTCTCAACAGTCAA |
| | ATGTGAAGTCAGTGAGTGCACTTATTCAGCAGACTTCGACGGGATGG |
| | CCACCCTGCAGTATGTATCCGACCGCGAAGGTCAATGCCCCGTACAT |
| | TCGCATTCGAGCACAGCAACTCTCCAAGAGTCGACAGTACATGTCCTG |
| | GAGAAAGGAGCGGTGACAGTACACTTTAGCACCGCGAGTCCACAGGC |
| | GAACTTTATCGTATCGCTGTGTGGGAAGAAGACAACATGCAATGCAGA |
| | ATGTAAACCACCAGCTGACCATATCGTGAGCACCCCGCACAAAAATGA |
| | CCAAGAATTTCAAGCCGCCATCTCAAAAACATCATGGAGTTGGCTGTT |
| | TGCCCTTTTCGGCGGCGCCTCGTCGCTATTAATTATAGGACTTATGAT |
| | TTTTGCTTGCAGCATGATGCTGACTAGCACACGAAGATGA |
| SEQ ID NO: | MSAAPLVTAMCLLGNVSFPCDRPPTCYTREPSRALDILEENVNHEAYDTL |
| 2003 | LNAILRCGSSGSVIDDFTLTSPYLGTCSYCHHTEPCFSPVKIEQVWDEAD |
| Sindbis toto | DNTIRIQTSAQFGYDHSGAASANKYRYMAAAAVTDYKDHDGDYKDHDID |
| SINV G | YKDDDDKGSGVPTIVMVDAYKRYKGGGGSVTTVAAGTMDDIKISTSGPC |
| gene (amino | RRLSYKGYFLLAKCPPGDSVTVSIVSSNSATSCTLARKIKPKFVGREKYDL |
| acid) | PPVHGKKIPCTVYDRLKETTAGYITMHRPGPHAYTSYLEESSGKVYAKPP |
| | SGKNITYECKCGDYKTGTVSTRTEITGCTAIKQCVAYKSDQTKWVFNSPD |
| | LIRHDDHTAQGKLHLPFKLIPSTCMVPVAHAPNVIHGFKHISLQLDTDHLTL |
| | LTTRRLGANPEPTTEWIVGKTVRNFTVDRDGLEYIWGNHEPVRVYAQES |
| | APGDPHGWPHEIVQHYYHRHPVYTILAVASATVAMMIGVTVAVLCACKAR |
| | RECLTPYALAPNAVIPTSLALLCCVRSANAETFTETMSYLWSNSQPFFWV |
| | QLCIPLAAFIVLMRCCSCCLPFLWAGAYLAKVDAYEHATTVPNVPQIPYK |
| | ALVERAGYAPLNLEITVMSSEVLPSTNQEYITCKFTTVVPSPKIKCCGSLE |
| | CQPAAHADYTCKVFGGVYPFMWGGAQCFCDSENSQMSEAYVELSADC |
| | ASDHAQAIKVHTAAMKVGLRIVYGNTTSFLDVYVNGVTPGTSKDLKVIAGP |
| | ISASFTPFDHKVVIHRGLVYNYDFPEYGAMKPGAFGDIQATSLTSKDLIAS |
| | TDIRLLKPSSGNVHVPYTQAASGFEMWKNNSGRPLQETAPFGCKIAVNPL |
| | RAVDCSYGNIPISIDIPNAAFIRTSDAPLVSTVKCEVSECTYSADFDGMATL |
| | QYVSDREGQCPVHSHSSTATLQESTVHVLEKGAVTVHFSTASPQANFIVS |
| | LCGKKTTCNAECKPPADHIVSTPHKNDQEFQAAISKTSWSWLFALFGGAS |
| | SLLIIGLMIFACSMMLTSTRR |
| SEQ ID NO: | ATGTCTGCCGCACCTCTGGTGACAGCCATGTGCCTGCTGGGCAACGT |
| 2004 | GAGCTTCCCTTGCAATCGGCCACCCACATGTTATACCAGGGAGCCAT |
| Sindbis | CCAGAGCCCTGGATATCCTGGAGGAGAACGTGAATCACGAGGCCTAC |
| girdwood | GACACCCTGCTGAACGCAATCCTGAGATGCGGCTCTAGCGGCCGGAG |
| SINV G | CAAGAGGAGCGTGACAGACGATTTCACCCTGACATCTCCCTACCTGG |
| gene | GCACCTGCAGCTATTGTCACCACACAGAGCCTTGTTTTTCCCCAATCA |
| (nucleic | AGATCGAGCAAGTGTGGGACGAGGCCGACGATAACACCATCAGAATC |
| acid) | CAGACCAGCGCCCAGTTCGGATACGATCAGAGCGGAGCAGCATCCTC |
| | TAATAAGTACAGATATATGAGCCTGGAGCAGGACCACACCGTGAAGG |
| | AGGGCACAATGGACGATATCAAGATCTCCACCTCTGGACCTTGCCGG |
| | CGCCTGTCCTACAAGGGATATTTTCTGCTGGCCAAGTGTCCTCCAGGC |
| | GACTCTGTGACAGTGAGCATCGCCAGCTCCAACTCTGCCACAAGCTG |
| | CACCATGGCCAGGAAGATCAAGCCTAAGTTCGTGGGCAGAGAGAAGT |
| | ACGACCTGCCCCCTGTGCACGGCAAGAAGATCCCATGTACCGTGTAT |
| | GATCGGCTGAAGGAGACCACAGCAGGATACATCACCATGCACAGGCC |
| | AGGACCTCACGCATACACATCTTATCTGGAGGAGTCTAGCGGCAAGG |
| | TGTATGCCAAGCCACCCAGCGGCAAGAACATCACCTACGAGTGCAAG |
| | TGTGGCGATTATAAGACCGGCACAGTGACCACAAGGACAGAGATCAC |
| | CGGCTGCACAGCCATCAAGCAGTGCGTGGCCTACAAGAGCGACCAGA |
| | CCAAGTGGGTGTTCAATTCCCCAGACCTGATCAGACACGCCGATCAC |
| | ACCGCACAGGGCAAGCTGCACCTGCCCTTTAAGCTGATCCCTTCCAC |
| | ATGCATGGTGCCAGTGGCACACGCACCAAACGTGGTGCACGGCTTCA |
| | AGCACATCTCTCTGCAGCTGGACACCGATCACCTGACACTGCTGACC |
| | ACAAGGAGACTGGGCGCCAATCCAGAGCCCACCACAGAGTGGATCAT |
| | CGGCAAGACCGTGCGGAACTTCACAGTGGACCGCGATGGCCTGGAG |
| | TATATCTGGGGCAATCACGAGCCTGTGCGGGTGTACGCACAGGAGTC |
| | CGCCCCAGGCGATCCCCACGGATGGCCACACGAGATCGTGCAGCAC |
| | TACTATCACCGCCACCCCGTGTACACCATCCTGGCAGTGGCAAGCGC |
| | CGCAGTGGCAATGATGATCGGAGTGACAGTGGCCGCCCTGTGCGCCT |
| | GTAAGGCAAGGAGGGAGTGCCTGACCCCTTATGCCCTGGCCCCAAAC |
| | GCCGTGATCCCCACATCTCTGGCCCTGCTGTGCTGCGTGAGGAGCGC |
| | CAACGCCGAGACCTTTACAGAGACCATGTCTTACCTGTGGAGCAATTC |
| | CCAGCCATTCTTTTGGGTGCAGCTGTGCATCCCACTGGCAGCCGTGA |
| | TCGTGCTGATGCGCTGCTGTAGCTGCTGTCTGCCCTTCCTGGTGGTG |
| | GCAGGAGCATACCTGGCAAAGGTGGACGCCTATGAGCACGCCACCAC |
| | AGTGCCTAATGTGCCACAGATCCCATATAAGGCCCTGGTGGAGAGGG |
| | CAGGATACGCACCACTGAACCTGGAGATCACCGTGATGTCCTCTGAG |
| | GTGCTGCCCTCCACCAATCAGGAGTATATCACATGCAAGTTTACCACA |
| | GTGGTGCCTTCCCCAAAGGTGAAGTGCTGTGGCTCTCTGGAGTGCCA |
| | GCCAGCAGCACACGCAGATTATACCTGTAAGGTGTTCGGCGGCGTGT |
| | ACCCCTTTATGTGGGGAGGAGCACAGTGCTTCTGTGACTCCGAGAAC |
| | TCTCAGATGAGCGAGGCCTACGTGGAGCTGAGCGCCGACTGTGCAAC |
| | CGATCACGCACAGGCCATCAAGGTGCACACAGCCGCCATGAAAGTGG |
| | GCCTGAGAATCGTGTATGGCAACACCACCAGCTTCCTGGACGTGTAC |
| | GTGAATGGCGTGACCCCTGGCACATCTAAGGACCTGAAAGTGATCGC |
| | CGGCCCAATCTCTGCCAGCTTCACCCCCTTTGATCACAAGGTGGTCAT |
| | CCACAGGGGCCTGGTGTACAATTATGACTTCCCTGAGTACGGCGCCA |
| | TGAAGCCAGGCGCCTTTGGCGATATCCAGGCCACCTCCCTGACATCT |
| | AAGGACCTGATCGCCTCCACCGATATCAGACTGCTGAAGCCCTCTGC |
| | CAAGAACGTGCACGTGCCTTATACACAGGCCGCCAGCGGCTTCGAGA |
| | TGTGGAAGAACAATTCCGGCCGGCCTCTGCAGGAGACCGCACCATTT |
| | GGCTGCAAGATCGCAGTGAATCCACTGAGGGCAGTGGACTGTTCCTA |
| | CGGAAACATCCCCATCTCTATCGATATCCCTAATGCCGCCTTTATCAG |
| | GACCTCCGACGCCCCTCTGGTGTCTACAGTGAAGTGCGACGTGTCCG |
| | AATGTACCTATTCTGCCGATTTCGGCGGCATGGCCACACTGCAGTACG |
| | TGTCCGACAGAGAGGGCCAGTGCCCCGTGCACTCTCACAGCTCCACA |
| | GCCACCCTGCAGGAGAGCACTGTGCACGTGCTGGAGAAGGGAGCAG |
| | TGACCGTGCACTTCAGCACAGCCTCCCCACAGGCCAACTTCATCGTG |
| | AGCCTGTGCGGCAAGAAGACCACATGCAATGCCGAGTGTAAGCCTCC |
| | AGCCGACCACATCGTGAGCACCCCCCACAAGAACGATCAGGAGTTTC |
| | AGGCCGCCATCTCCAAGACATCCTGGTCTTGGCTGTTCGCCCTGTTTG |
| | GCGGCGCCTCTAGCCTGCTGATCATCGGCCTGATGATCTTCGCCTGC |
| | AGCATGATGCTGACATCCACCAGGAGATGA |
| SEQ ID NO: | MSAAPLVTAMCLLGNVSFPCNRPPTCYTREPSRALDILEENVNHEAYDTL |
| 2005 | LNAILRCGSSGRSKRSVTDDFTLTSPYLGTCSYCHHTEPCFSPIKIEQVWD |
| Sindbis | EADDNTIRIQTSAQFGYDQSGAASSNKYRYMSLEQDHTVKEGTMDDIKIS |
| girdwood | TSGPCRRLSYKGYFLLAKCPPGDSVTVSIASSNSATSCTMARKIKPKFVG |
| SINV G | REKYDLPPVHGKKIPCTVYDRLKETTAGYITMHRPGPHAYTSYLEESSGK |
| gene (amino | VYAKPPSGKNITYECKCGDYKTGTVTTRTEITGCTAIKQCVAYKSDQTKW |
| acid) | VFNSPDLIRHADHTAQGKLHLPFKLIPSTCMVPVAHAPNWHGFKHISLQL |
| | DTDHLTLLTTRRLGANPEPTTEWIIGKTVRNFTVDRDGLEYIWGNHEPVR |
| | VYAQESAPGDPHGWPHEIVQHYYHRHPVYTILAVASAAVAMMIGVTVAAL |
| | CACKARRECLTPYALAPNAVIPTSLALLCCVRSANAETFTETMSYLWSNS |
| | QPFFWVQLCIPLAAVIVLMRCCSCCLPFLWAGAYLAKVDAYEHATTVPN |
| | VPQIPYKALVERAGYAPLNLEITVMSSEVLPSTNQEYITCKFTTVVPSPKVK |
| | CCGSLECQPAAHADYTCKVFGGVYPFMWGGAQCFCDSENSQMSEAYV |
| | ELSADCATDHAQAIKVHTAAMKVGLRIVYGNTTSFLDVYVNGVTPGTSKD |
| | LKVIAGPISASFTPFDHKWIHRGLVYNYDFPEYGAMKPGAFGDIQATSLT |
| | SKDLIASTDIRLLKPSAKNVHVPYTQAASGFEMWKNNSGRPLQETAPFGC |
| | KIAVNPLRAVDCSYGNIPISIDIPNAAFIRTSDAPLVSTVKCDVSECTYSADF |
| | GGMATLQYVSDREGQCPVHSHSSTATLQESTVHVLEKGAVTVHFSTASP |
| | QANFIVSLCGKKTTCNAECKPPADHIVSTPHKNDQEFQAAISKTSWSWLF |
| | ALFGGASSLLIIGLMIFACSMMLTSTRR |
| SEQ ID NO: | ATGTCCGCCCCGCTGATTACTGCCATGTGTGTCCTTGCCAATGCTACC |
| 2006 | TTCCCGTGCTTCCAGCCCCCGTGTGTACCTTGCTGCTATGAAAACAAC |
| Semliki | GCAGAGGCCACACTACGGATGCTCGAGGATAACGTGGATAGGCCAG |
| Forest virus | GGTACTACGACCTCCTTCAGGCAGCCTTGACGTGCCGAAACGGAACA |
| SFV G gene | AGACACCGGCGCAGCGTGTCGCAACACTTCAACGTGTATAAGGCTAC |
| (nucleic | ACGCCCTTACATCGCGTACTGCGCCGACTGCGGAGCAGGGCACTCGT |
| acid) | GTCATAGCCCCGTAGCAATTGAAGCGATCAGGTCCGAAGCTACCGAC |
| | GGGATGCTGAAGATTCAGTTCTCGGCACAAATTGGCATAGATAAGAGT |
| | GACAATCATGACTACACGAAGATAAGGTACGCAGACGGGCACGCCAT |
| | TGAGAATGCCGTCCGGTCATCTTTGAAGGTAGCCACCTCCGGAGACT |
| | GTTTCGTCCATGGCACAATGGGACATTTCATACTGGCAAAGTGCCCAC |
| | CGGGTGAATTCCTGCAGGTCTCGATCCAGGACACCAGAAACGCGGTC |
| | CGTGCCTGCAGAATACAATATCATCATGACCCTCAACCGGTGGGTAGA |
| | GAAAAATTTACAATTAGACCACACTATGGAAAAGAGATCCCTTGCACC |
| | ACTTATCAACAGACCACAGCGAAGACCGTGGAGGAAATCGACATGCA |
| | TATGCCGCCAGATACGCCGGACAGGACGTTGCTATCACAGCAATCTG |
| | GCAATGTAAAGATCACAGTCGGAGGAAAGAAGGTGAAATACAACTGCA |
| | CCTGTGGAACCGGAAACGTTGGCACTACTAATTCGGACATGACGATCA |
| | ACACGTGTCTAATAGAGCAGTGCCACGTCTCAGTGACGGACCATAAG |
| | AAATGGCAGTTCAACTCACCTTTCGTCCCGAGAGCCGACGAACCGGC |
| | TAGAAAAGGCAAAGTCCATATCCCATTCCCGTTGGACAACATCACATG |
| | CAGAGTTCCAATGGCGCGCGAACCAACCGTCATCCACGGCAAAAGAG |
| | AAGTGACACTGCACCTTCACCCAGATCATCCCACGCTCTTTTCCTACC |
| | GCACACTGGGTGAGGACCCGCAGTATCACGAGGAATGGGTGACAGC |
| | GGCGGTGGAACGGACCATACCCGTACCAGTGGACGGGATGGAGTAC |
| | CACTGGGGAAACAACGACCCAGTGAGGCTTTGGTCTCAACTCACCAC |
| | TGAAGGGAAACCGCACGGCTGGCCGCATCAGATCGTACAGTACTACT |
| | ATGGGCTTTACCCGGCCGCTACAGTATCCGCGGTCGTCGGGATGAGC |
| | TTACTGGCGTTGATATCGATCTTCGCGTCGTGCTACATGCTGGTTGCG |
| | GCCCGCAGTAAGTGCTTGACCCCTTATGCTTTAACACCAGGAGCTGCA |
| | GTTCCGTGGACGCTGGGGATACTCTGCTGCGCCCCGCGGGCGCACG |
| | CAGCTAGTGTGGCAGAGACTATGGCCTACTTGTGGGACCAAAACCAA |
| | GCGTTGTTCTGGTTGGAGTTTGCGGCCCCTGTTGCCTGCATCCTCATC |
| | ATCACGTATTGCCTCAGAAACGTGCTGTGTTGCTGTAAGAGCCTTTCT |
| | TTTTTAGTGCTACTGAGCCTCGGGGCAACCGCCAGAGCTTACGAACAT |
| | TCGACAGTAATGCCGAACGTGGTGGGGTTCCCGTATAAGGCTCACAT |
| | TGAAAGGCCAGGATATAGCCCCCTCACTTTGCAGATGCAGGTTGTTGA |
| | AACCAGCCTCGAACCAACCCTTAATTTGGAATACATAACCTGTGAGTA |
| | CAAGACGGTCGTCCCGTCGCCGTACGTGAAGTGCTGCGGCGCCTCA |
| | GAGTGCTCCACTAAAGAGAAGCCTGACTACCAATGCAAGGTTTACACA |
| | GGCGTGTACCCGTTCATGTGGGGAGGGGCATATTGCTTCTGCGACTC |
| | AGAAAACACGCAACTCAGCGAGGCGTACGTCGATCGATCGGACGTAT |
| | GCAGGCATGATCACGCATCTGCTTACAAAGCCCATACAGCATCGCTGA |
| | AGGCCAAAGTGAGGGTTATGTACGGCAACGTAAACCAGACTGTGGAT |
| | GTTTACGTGAACGGAGACCATGCCGTCACGATAGGGGGTACTCAGTT |
| | CATATTCGGGCCGCTGTCATCGGCCTGGACCCCGTTCGACAACAAGA |
| | TAGTCGTGTACAAAGACGAAGTGTTCAATCAGGACTTCCCGCCGTACG |
| | GATCTGGGCAACCAGGGCGCTTCGGCGACATCCAAAGCAGAACAGTG |
| | GAGAGTAACGACCTGTACGCGAACACGGCACTGAAGCTGGCACGCCC |
| | TTCACCCGGCATGGTCCATGTACCGTACACACAGACACCTTCAGGGTT |
| | CAAATATTGGCTAAAGGAAAAAGGGACAGCCCTAAATACGAAGGCTCC |
| | TTTTGGCTGCCAAATCAAAACGAACCCTGTCAGGGCCATGAACTGCGC |
| | CGTGGGAAACATCCCTGTCTCCATGAATTTGCCTGACAGCGCCTTTAC |
| | CCGCATTGTCGAGGCGCCGACCATCATTGACCTGACTTGCACAGTGG |
| | CTACCTGTACGCACTCCTCGGATTTCGGCGGCGTCTTGACACTGACG |
| | TACAAGACCGACAAGAACGGGGACTGCTCTGTACACTCGCACTCTAA |
| | CGTAGCTACTCTACAGGAGGCCACAGCAAAAGTGAAGACAGCAGGTA |
| | AGGTGACCTTACACTTCTCCACGGCAAGCGCATCACCTTCTTTTGTGG |
| | TGTCGCTATGCAGTGCTAGGGCCACCTGTTCAGCGTCGTGTGAGCCC |
| | CCGAAAGACCACATAGTCCCATATGCGGCCAGCCACAGTAACGTAGT |
| | GTTTCCAGACATGTCGGGCACCGCACTATCATGGGTGCAGAAAATCTC |
| | GGGTGGTCTGGGGGCCTTCGCAATCGGCGCTATCCTGGTGCTGGTTG |
| | TGGTCACTTGCATTGGGCTCCGCAGATAA |
| SEQ ID NO: | MSAPLITAMCVLANATFPCFQPPCVPCCYENNAEATLRMLEDNVDRPGY |
| 2007 | YDLLQAALTCRNGTRHRRSVSQHFNVYKATRPYIAYCADCGAGHSCHSP |
| Semliki | VAIEAIRSEATDGMLKIQFSAQIGIDKSDNHDYTKIRYADGHAIENAVRSSL |
| Forest virus | KVATSGDCFVHGTMGHFILAKCPPGEFLQVSIQDTRNAVRACRIQYHHDP |
| SFV G gene | QPVGREKFTIRPHYGKEIPCTTYQQTTAKTVEEIDMHMPPDTPDRTLLSQ |
| (amino acid) | QSGNVKITVGGKKVKYNCTCGTGNVGTTNSDMTINTCLIEQCHVSVTDHK |
| | KWQFNSPFVPRADEPARKGKVHIPFPLDNITCRVPMAREPTVIHGKREVT |
| | LHLHPDHPTLFSYRTLGEDPQYHEEWVTAAVERTIPVPVDGMEYHWGNN |
| | DPVRLWSQLTTEGKPHGWPHQIVQYYYGLYPAATVSAVVGMSLLALISIF |
| | ASCYMLVAARSKCLTPYALTPGAAVPWTLGILCCAPRAHAASVAETMAYL |
| | WDQNQALFWLEFAAPVACILIITYCLRNVLCCCKSLSFLVLLSLGATARAY |
| | EHSTVMPNVVGFPYKAHIERPGYSPLTLQMQVVETSLEPTLNLEYITCEYK |
| | TVVPSPYVKCCGASECSTKEKPDYQCKVYTGVYPFMWGGAYCFCDSEN |
| | TQLSEAYVDRSDVCRHDHASAYKAHTASLKAKVRVMYGNVNQTVDVYV |
| | NGDHAVTIGGTQFIFGPLSSAWTPFDNKIVVYKDEVFNQDFPPYGSGQPG |
| | RFGDIQSRTVESNDLYANTALKLARPSPGMVHVPYTQTPSGFKYWLKEK |
| | GTALNTKAPFGCQIKTNPVRAMNCAVGNIPVSMNLPDSAFTRIVEAPTIIDL |
| | TCTVATCTHSSDFGGVLTLTYKTDKNGDCSVHSHSNVATLQEATAKVKTA |
| | GKVTLHFSTASASPSFWSLCSARATCSASCEPPKDHIVPYAASHSNVVF |
| | PDMSGTALSWVQKISGGLGAFAIGAILVLVVVTCIGLRR. |
| SEQ ID NO: | ATGTCACTTGCTCTGCCTGTTCTGTGCCTGCTGGCCAACACCACCTTT |
| 2008 | CCATGTAGCCAGCCTCCATGCACACCCTGCTGCTACGAGAAAGAGCC |
| Chikunguny | TGAGAGCACCCTGCGGATGCTGGAAGATAACGTGATGAGGCCCGGCT |
| a virus | ACTACCAGCTGCTGAAGGCCTCTCTGACATGCAGCCCTCACCGGCAG |
| (strain | AGAAGATCCACCAAGGACAACTTCAACGTCTACAAGGCCACCAGACCT |
| 37997) | TACCTGGCTCACTGCCCTGATTGTGGCGAGGGCCACTCTTGTCACAG |
| CHIKV G | CCCTATCGCTCTGGAACGGATCAGAAACGAGGCCACCGATGGCACCC |
| gene | TGAAGATCCAGGTGTCCCTGCAGATCGGAATCAAGACCGACGACAGC |
| (nucleic | CACGACTGGACCAAGCTGCGGTACATGGACTCTCACACACCAGCCGA |
| acid) | TGCCGAGCGAGCTGGACTGCTCGTTAGAACATCTGCCCCTTGCACCA |
| | TCACCGGCACAATGGGCCACTTCATCCTGGCCAGATGTCCCAAGGGC |
| | GAGACACTGACCGTGGGCTTCACCGACAGCCGGAAGATCAGCCACAC |
| | ATGCACACACCCCTTCCACCACGAGCCTCCAGTGATCGGCAGAGAGA |
| | GGTTCCACAGCAGACCCCAGCACGGCAAAGAGCTGCCTTGTAGCACA |
| | TACGTGCAGAGCACAGCCGCCACCGCCGAAGAGATTGAAGTGCACAT |
| | GCCTCCAGACACACCCGACAGAACCCTGATGACACAGCAGAGCGGCA |
| | ACGTGAAGATCACCGTGAATGGCCAGACCGTGCGGTACAAGTGTAAC |
| | TGCGGCGGCTCTAATGAGGGCCTGACCACCACCGACAAAGTGATCAA |
| | CAACTGCAAGATCGACCAGTGCCACGCCGCCGTGACCAACCACAAGA |
| | ACTGGCAGTACAACAGCCCACTGGTGCCCAGAAATGCCGAGCTGGGC |
| | GATAGAAAGGGCAAGATTCACATCCCCTTTCCACTGGCCAACGTGACC |
| | TGCAGAGTGCCAAAGGCCAGAAATCCCACCGTGACCTACGGCAAGAA |
| | TCAAGTGACAATGCTGCTGTACCCCGACCATCCTACACTGCTGAGCTA |
| | CCGGAACATGGGCCAAGAGCCTAACTACCACGAAGAGTGGGTCACCC |
| | ACAAGAAAGAAGTGACCCTGACAGTCCCCACCGAAGGCCTGGAAGTG |
| | ACCTGGGGAAACAACGAGCCCTACAAGTACTGGCCCCAGATGAGCAC |
| | CAATGGCACAGCCCACGGACACCCTCACGAGATCATCCTGTACTACTA |
| | CGAGCTGTACCCTACCATGACCGTGGTCATCGTGTCTGTGGCCAGCT |
| | TCGTGCTGCTGAGCATGGTTGGAACAGCCGTGGGGATGTGCGTGTGC |
| | GCTAGAAGAAGATGCATCACCCCTTACGAGCTGACACCCGGCGCTAC |
| | CGTTCCTTTTCTGCTGTCCCTGCTGTGCTGTGTGCGGACAACAAAGGC |
| | CGCCACCTACTATGAGGCCGCTGCCTACCTGTGGAACGAGCAGCAAC |
| | CTCTGTTTTGGCTGCAAGCCCTGATTCCTCTGGCCGCTCTGATCGTGC |
| | TGTGCAACTGTCTGAAGCTGCTGCCTTGCTGTTGCAAGACCCTGGCCT |
| | TTCTGGCCGTGATGTCTATCGGCGCCCATACCGTGTCTGCCTACGAG |
| | CACGTGACAGTGATCCCCAATACCGTGGGAGTGCCTTACAAGACCCT |
| | CGTGAACAGACCCGGCTATTCCCCTATGGTGCTGGAAATGGAACTGC |
| | AGAGCGTGACCCTGGAACCTACACTGAGCCTGGACTACATCACATGC |
| | GAGTACAAGACCGTGATACCCTCTCCATACGTGAAGTGCTGTGGCAC |
| | CGCCGAGTGCAAGGATAAGAGCCTGCCTGACTACAGCTGCAAGGTGT |
| | TCACCGGCGTGTACCCCTTTATGTGGGGCGGAGCCTACTGCTTCTGC |
| | GACGCCGAGAATACCCAGCTGTCTGAGGCCCACGTGGAAAAGAGCGA |
| | GAGCTGCAAGACCGAGTTCGCCAGCGCCTATAGAGCCCATACAGCCT |
| | CTGCCAGCGCCAAGCTGAGAGTGCTGTACCAGGGCAACAACATCACC |
| | GTGGCCGCCTACGCCAATGGCGATCATGCCGTGACTGTGAAGGACGC |
| | CAAGTTCGTCGTGGGCCCTATGTCTAGCGCCTGGACACCCTTCGATA |
| | ACAAGATCGTGGTGTATAAGGGCGACGTTTACAACATGGACTACCCTC |
| | CATTCGGAGCCGGCAGACCTGGACAGTTCGGAGACATCCAGAGCAGA |
| | ACCCCTGAGTCCAAGGACGTGTACGCCAACACACAGCTGGTGCTGCA |
| | AAGACCTGCCGCCGGAACAGTGCACGTGCCCTATTCTCAAGCCCCTA |
| | GCGGCTTCAAGTATTGGCTGAAAGAGAGAGGCGCCAGCCTGCAGCAT |
| | ACAGCCCCTTTTGGCTGTCAGATCGCCACCAATCCTGTGCGGGCCGT |
| | GAATTGTGCCGTGGGCAATATCCCCATCAGCATCGACATCCCCGACG |
| | CCGCCTTTACCAGAGTGGTTGATGCCCCAAGCGTGACCGACATGTCT |
| | TGCGAGGTGCCAGCTTGTACCCACAGCAGCGATTTTGGCGGAGTGGC |
| | CATCATCAAGTACACCGCCTCCAAGAAAGGCAAGTGTGCCGTGCACA |
| | GCATGACCAACGCCGTGACAATCAGAGAAGCCGACGTGGAAGTGGAA |
| | GGCAACAGCCAGCTGCAGATCAGCTTCTCTACAGCCCTGGCCTCCGC |
| | CGAGTTCAGAGTGCAAGTCTGTAGCACCCAGGTGCACTGTGCTGCCG |
| | CTTGTCACCCTCCAAAGGACCACATCGTGAACTACCCCGCCAGCCAC |
| | ACTACACTGGGAGTGCAGGATATTAGCACCACCGCCATGAGCTGGGT |
| | GCAGAAAATCACAGGTGGCGTGGGACTGATCGTGGCCGTGGCTGCTC |
| | TGATTCTGATCGTTGTGCTGTGCGTGTCCTTCAGCCGGCAT |
| SEQ ID NO: | MSLALPVLCLLANTTFPCSQPPCTPCCYEKEPESTLRMLEDNVMRPGYY |
| 2009 | QLLKASLTCSPHRQRRSTKDNFNVYKATRPYLAHCPDCGEGHSCHSPIA |
| Chikunguny | LERIRNEATDGTLKIQVSLQIGIKTDDSHDWTKLRYMDSHTPADAERAGLL |
| a virus | VRTSAPCTITGTMGHFILARCPKGETLTVGFTDSRKISHTCTHPFHHEPPV |
| (strain | IGRERFHSRPQHGKELPCSTYVQSTAATAEEIEVHMPPDTPDRTLMTQQ |
| 37997) | SGNVKITVNGQTVRYKCNCGGSNEGLTTTDKVINNCKIDQCHAAVTNHKN |
| CHIKV G | WQYNSPLVPRNAELGDRKGKIHIPFPLANVTCRVPKARNPTVTYGKNQVT |
| gene (amino | MLLYPDHPTLLSYRNMGQEPNYHEEWVTHKKEVTLTVPTEGLEVTWGN |
| acid) | NEPYKYWPQMSTNGTAHGHPHEIILYYYELYPTMTVVIVSVASFVLLSMV |
| | GTAVGMCVCARRRCITPYELTPGATVPFLLSLLCCVRTTKAATYYEAAAY |
| | LWNEQQPLFWLQALIPLAALIVLCNCLKLLPCCCKTLAFLAVMSIGAHTVS |
| | AYEHVTVIPNTVGVPYKTLVNRPGYSPMVLEMELQSVTLEPTLSLDYITCE |
| | YKTVIPSPYVKCCGTAECKDKSLPDYSCKVFTGVYPFMWGGAYCFCDAE |
| | NTQLSEAHVEKSESCKTEFASAYRAHTASASAKLRVLYQGNNITVAAYAN |
| | GDHAVTVKDAKFWGPMSSAWTPFDNKIVVYKGDVYNMDYPPFGAGRP |
| | GQFGDIQSRTPESKDVYANTQLVLQRPAAGTVHVPYSQAPSGFKYWLKE |
| | RGASLQHTAPFGCQIATNPVRAVNCAVGNIPISIDIPDAAFTRVVDAPSVT |
| | DMSCEVPACTHSSDFGGVAIIKYTASKKGKCAVHSMTNAVTIREADVEVE |
| | GNSQLQISFSTALASAEFRVQVCSTQVHCAAACHPPKDHIVNYPASHTTL |
| | GVQDISTTAMSWVQKITGGVGLIVAVAALILIVVLCVSFSRH |
| SEQ ID NO: | ATGGACTTCCTGCCTACACAGGTGTTCTACGGCCGAAGATGGCGGCC |
| 2010 | CAGAATGCCTCCTAGACCTTGGAGGCCTAGAATGCCCACCATGCAGA |
| Mayaro | GGCCTGATCAGCAGGCCAGACAGATGCAGCAGCTGATTGCCGCCGT |
| virus (strain | GTCTACACTGGCCCTGAGACAGAATGCTGCCGCTCCTCAGAGAGGCA |
| Beh407) | AGAAGAAGCAGCCCAGACGGAAGAAGCCCAAGCCTCAGCCTGAGAA |
| MAYV G | GCCTAAGAAGCAAGAGCAGAAACCCAAGCAGAAGATGGCCCCTAAGC |
| gene | GGAAGCCTGGCAGACGCGAGAGAATGTGCATGAAGATCGAGCACGA |
| (nucleic | CTGCATCTTCGAAGTGAAGCACGAGGGCAAAGTGACCGGCTACGCCT |
| acid) | GTCTCGTGGGCGACAAAGTGATGAAGCCTGCTCATGTGCCCGGCGTG |
| | ATCGACAATGCCGATCTGGCTCGGCTGAGCTACAAGAAGTCCTCTAA |
| | GTACGACCTGGAATGCGCTCAGATCCCCGTGGCCATGAAGTCCGATG |
| | CCAGCAAGTACACCCACGAGAAGCCTGAGGGCCACTACAACTGGCAT |
| | TATGGCGCCGTGCAGTACACCGGCGGCAGATTCACAGTTCCTACAGG |
| | CGTGGGAAAGCCCGGCGATTCTGGCAGACCCATCTTCGACAACAAGG |
| | GCAGAGTGGTGGCCATCGTGCTTGGCGGAGCTAATGAGGGCACAAG |
| | AACAGCCCTGAGCGTGGTCACCTGGAACAAGGACATGGTCACCAAGA |
| | TCACCCCTGAGGGCACTGTGGAATGGGCCGCCTCTACAGTGACAGCC |
| | ATGTGCCTGCTGACCAACATCAGCTTCCCTTGCTTCCAGCCTAGCTGC |
| | GCCCCTTGCTGTTATGAGAAGGGCCCTGAGCCTACACTGCGGATGCT |
| | GGAAGAGAACGTGAACAGCGAGGGCTACTACGACCTGCTGCACGCC |
| | GCTGTGTACTGCCGGAATAGCAGCAGATCCAAGCGGAGCACCGCCAA |
| | CCACTTCAACGCCTACAAGCTGACCAGACCTTACGTGGCCTACTGCG |
| | CCGATTGTGGCATGGGCCACTCTTGTCACAGCCCCGCCATGATCGAG |
| | AACATCCAGGCCGATGCCACCGACGGCACACTGAAGATCCAGTTCGC |
| | CTCTCAGATCGGCCTGACCAAGACCGACACACACGACCACACAAAGA |
| | TCAGATACGCCGAGGGCCACGACATTGCCGAAGCCGCTAGAAGCACC |
| | CTGAAGGTGCACAGCAGCAGCGAGTGTACCGTGACAGGCACCATGG |
| | GACACTTCATCCTGGCCAAGTGTCCTCCAGGCGAGGCCATCTCCGTG |
| | TCCTTCGTGGACAGCAAGAACGAGCACCGGACCTGCAGGATCGCCTA |
| | TCTGCACGAGCAGAGACTGATCGGCCGCGAGAGATTCACCGTCAGAC |
| | CTCACCACGGAATCGAGCTGCCTTGCACCACCTACCAGCTGACAACA |
| | GCCGAGACAAGCGAAGAGATCGACATGCACATGCCTCCAGACATCCC |
| | CGACAGAACCATCCTGTCTCAGCAGAGCGGCAACGTGAAGATCACCG |
| | TGAACGGCAGAACCGTGCGGTACAGCTGTTCCTGTGGCAGCAAGCCT |
| | AGCGGCACCACCACCACAGACAAGACCATCAACAGCTGCACCGTGGA |
| | CAAGTGCCAGGCCTACGTGACAAGCCACACCAAGTGGCAGTTCAACA |
| | GCCCCTTCGTGCCTAGAGCCGAGCAGGCCGAGAGAAAAGGCAAAGT |
| | GCACATCCCCTTTCCGCTGATCAACACCACCTGTCGGGTTCCACTGG |
| | CTCCAGAGGCTCTCGTTAGAAGCGGCAAGAGAGAGGCCACACTGTCT |
| | CTGCACCCTATTCACCCCACACTGCTGTCCTACAGAACCCTGGGAGC |
| | CGAGCCTGTGTTCGACGAGCAGTGGATCACTGCCCAGACCGAAGTGA |
| | CAATCCCCGTGCCTGTTGAAGGCGTGGAATACCAGTGGGGCAATCAC |
| | AAGCCCCAGAGACTGTGGTCCCAGCTGACCACTGAGGGAAAAGCCCA |
| | CGGATGGCCCCACGAGATCATCGAGTACTACTACGGACTGCACCCCA |
| | CAACCACCATCGTGGTCGTGATTGCTGTCAGCGTGGTGGTCCTGCTG |
| | AGCTTTGCCGCCTCCGTGTATATGTGCGTGGTGGCCCGGAACAAGTG |
| | TCTGACCCCTTACGCTCTTACACCCGGCGCTGTTGTGCCTGTGACAAT |
| | CGGAGTGCTGTGCTGTGCCCCTAAAGCTCACGCCGCCAGTTTTGCCG |
| | AAGGCATGGCCTACCTGTGGGACAACAACCAGAGCATGTTCTGGATG |
| | GAACTGACAGGCCCTCTGGCTCTCCTGATCCTGGCTACATGTTGCGC |
| | AAGATCCCTGCTGTCTTGCTGCAAGGGCAGCTTCCTGGTGGCTATGT |
| | CTATCGGATCTGCCGTGGCCAGCGCCTACGAGCACACAGCCATCATT |
| | CCCAATCAAGTGGGCTTCCCCTACAAGGCCCACGTGGCCAGAGAGGG |
| | CTATTCCCCTCTGACACTGCAAATGCAAGTGATCGAAACCAGCCTGGA |
| | ACCGACACTGAACCTTGAGTACATCACCTGTGACTACAAGACCAAGGT |
| | GCCCTCTCCATACGTGAAGTGCTGTGGCACCGCCGAGTGCAGAACCC |
| | AGGATAAGCCCGAGTATAAGTGCGCCGTGTTCACCGGCGTGTACCCC |
| | TTTATGTGGGGCGGAGCCTACTGCTTCTGCGACAGCGAGAATACCCA |
| | GATGAGCGAGGCCTATGTCGAGAGGGCCGATGTGTGCAAGCACGAC |
| | CATGCCGCTGCCTACAGAGCCCACACAGCTTCTCTGCGGGCCAAGAT |
| | CAAAGTGACATACGGCACCGTGAATCAGACCGTGGAAGCCTATGTGA |
| | ACGGCGACCACGCCGTGACCATTGCCGGCACCAAGTTTATCTTTGGC |
| | CCCGTGTCCACCGCCTGGACACCCTTCGATACAAAGATCGTGGTGTA |
| | TAAGGGCGAAGTCTACAACCAGGACTTCCCTCCTTACGGCGCTGGAC |
| | AGCCAGGCAGATTCGGAGACATCCAGAGCAGGACCCTGGATAGCAG |
| | GGACCTGTATGCCAACACCGGCCTGAAACTGGCTAGACCAGCCGCCG |
| | GAAATATCCACGTGCCATACACACAGACCCCAAGCGGCTTCAAGACCT |
| | GGCAGAAGGACAGAGACAGCCCTCTGAACGCCAAGGCTCCTTTCGGC |
| | TGCATCATCCAGACCAATCCTGTGCGGGCCATGAATTGCGCCGTGGG |
| | CAATATCCCCGTGTCTATGGACATTGCTGACAGCGCCTTCACCAGACT |
| | GACAGACGCCCCTGTGATCAGCGAGCTGACCTGCACAGTGTCCACAT |
| | GCACCCACAGCAGCGACTTTGGAGGAATCGCCGTGCTGAGCTATAAG |
| | GTGGAAAAGTCCGGCAGATGCGACATCCACAGCCACAGCAATGTGGC |
| | CGTGCTGCAAGAGGTGTCCATCGAGACAGAGGGCAGAAGCGTGATCC |
| | ATTTCTCCACCGCAAGCGCCTCTCCATCCTTTGTGGTGTCCGTGTGCA |
| | GCAGCAGAGCCACCTGTACCGCCAAGTGCGAGCCTCCTAAGGATCAC |
| | GTGGTCACATACCCCGCCAATCACAACGGCGTGACCCTGCCTGATCT |
| | GTCCTCTACCGCTATGACATGGGCCCAGCATCTGGCTGGCGGAGTGG |
| | GACTGCTTATTGCTCTGGCAGTGCTGATCCTCGTGATCGTGACCTGTG |
| | TGACCCTGAGGCGGTAA |
| SEQ ID NO: | MDFLPTQVFYGRRWRPRMPPRPWRPRMPTMQRPDQQARQMQQLIAAV |
| 2011 | STLALRQNAAAPQRGKKKQPRRKKPKPQPEKPKKQEQKPKQKMAPKRK |
| Mayaro | PGRRERMCMKIEHDCIFEVKHEGKVTGYACLVGDKVMKPAHVPGVIDNA |
| virus (strain | DLARLSYKKSSKYDLECAQIPVAMKSDASKYTHEKPEGHYNWHYGAVQY |
| Beh407) | TGGRFTVPTGVGKPGDSGRPIFDNKGRVVAIVLGGANEGTRTALSVVTW |
| MAYV G | NKDMVTKITPEGTVEWAASTVTAMCLLTNISFPCFQPSCAPCCYEKGPEP |
| gene (amino | TLRMLEENVNSEGYYDLLHAAVYCRNSSRSKRSTANHFNAYKLTRPYVA |
| acid) | YCADCGMGHSCHSPAMIENIQADATDGTLKIQFASQIGLTKTDTHDHTKIR |
| | YAEGHDIAEAARSTLKVHSSSECTVTGTMGHFILAKCPPGEAISVSFVDSK |
| | NEHRTCRIAYLHEQRLIGRERFTVRPHHGIELPCTTYQLTTAETSEEIDMH |
| | MPPDIPDRTILSQQSGNVKITVNGRTVRYSCSCGSKPSGTTTTDKTINSCT |
| | VDKCQAYVTSHTKWQFNSPFVPRAEQAERKGKVHIPFPLINTTCRVPLAP |
| | EALVRSGKREATLSLHPIHPTLLSYRTLGAEPVFDEQWITAQTEVTIPVPV |
| | EGVEYQWGNHKPQRLWSQLTTEGKAHGWPHEIIEYYYGLHPTTTIVVVIA |
| | VSVVVLLSFAASVYMCVVARNKCLTPYALTPGAVVPVTIGVLCCAPKAHA |
| | ASFAEGMAYLWDNNQSMFWMELTGPLALLILATCCARSLLSCCKGSFLV |
| | AMSIGSAVASAYEHTAIIPNQVGFPYKAHVAREGYSPLTLQMQVIETSLEP |
| | TLNLEYITCDYKTKVPSPYVKCCGTAECRTQDKPEYKCAVFTGVYPFMW |
| | GGAYCFCDSENTQMSEAYVERADVCKHDHAAAYRAHTASLRAKIKVTYG |
| | TVNQTVEAYVNGDHAVTIAGTKFIFGPVSTAWTPFDTKIVVYKGEVYNQD |
| | FPPYGAGQPGRFGDIQSRTLDSRDLYANTGLKLARPAAGNIHVPYTQTPS |
| | GFKTWQKDRDSPLNAKAPFGCIIQTNPVRAMNCAVGNIPVSMDIADSAFT |
| | RLTDAPVISELTCTVSTCTHSSDFGGIAVLSYKVEKSGRCDIHSHSNVAVL |
| | QEVSIETEGRSVIHFSTASASPSFVVSVCSSRATCTAKCEPPKDHVVTYP |
| | ANHNGVTLPDLSSTAMTWAQHLAGGVGLLIALAVLILVIVTCVTLRR. |
| SEQ ID NO: | atgTCTCTGGCCCTGCCTGTGATGATGTGCCTGCTGGCCAACACCACC |
| 2012 | TTTCCATGCAGCCAGCCTCCATGCGCTCCCTGCTGTTACGAGAAGAA |
| O'nyong- | GCCCGAAGAGACACTGCGGATGCTGGAAGATAACGTGATGCAGCCCG |
| nyong virus | GCTACTACCAGCTGCTGGATTCTGCCCTGGCCTGCTCTCAGCGGAGA |
| (strain | CAGAAGAGAAACGCCCGCGAGAACTTCAACGTCTACAAAGTGACCCG |
| MP30) | GCCTTACCTGGCTCACTGCCCTGATTGTGGCGAGGGCCACTCTTGTC |
| ONNV G | ACAGCCCTATCGCTCTGGAACGGATCAGATCCGAGGCCACCGATGGC |
| gene | ACCCTGAAGATTCAGGTGTCCCTGCAGATCGGCATCAAGACCGACGA |
| (nucleic | CAGCCACGACTGGACAAAGCTGCGGTACATGGACAGCCACACACCTG |
| acid) | TGGACGCCGATAGAAGCGGACTGTTCGTGCGGACATCTGCCCCTTGC |
| | ACAATCACCGGCACCATGGGCCACTTCATCCTGGCCAGATGTCCCAA |
| | GGGCGAGACACTGACAGTGGGCTTCGTGGACAGCAGACGGATCAGC |
| | CACACCTGTATGCACCCCTTCAGACACGAGCCTCCACTGATCGGCAG |
| | AGAGAAGTTCCACAGCAGACCCCAGCACGGCAAAGAGCTGCCTTGTA |
| | GCACCTACGTGCACACCACAGCCGCCACCGCCGAAGAGATTGAAGTG |
| | CACATGCCTCCAGACACACCCGACTACACCCTGATGACACAGCAGGC |
| | CGGCAACGTGAAGATCACCGTGGATGGCCAGACCGTGCGGTACAAGT |
| | GCAAGTGCGACGGCTCTAACGAGGGCCTGATCACCGCCGACAAAGTG |
| | ATCAACAACTGCAAGGTGGACCAGTGCCACACCGCCGTGACCAACCA |
| | CAAGAAGTGGCAGTACAACAGCCCTCTGACACCCCGGAATAGCGAGC |
| | AGGGCGATAGAAAGGGCAAGATTCACATCCCCTTTCCGCTGGTCAAC |
| | ACAACCTGCAGAGTGCCCAAGGCCAGAAATCCCACCGTGACCTACGG |
| | CAAGAACAGAGTGACACTGCTGCTGCACCCAGATCACCCCACACTGC |
| | TGAGCTACAGAGCCATGGGAAGAATCCCCGACTACCACGAGGAATGG |
| | ATCACCAACAAGAAAGAAATCAGCATCACCGTGCCTGCCGAAGGCCT |
| | GGAAGTGACCTGGGGCAACAACGACCCCTACAAGTACTGGCCACAGC |
| | TGAGCACCAATGGCACAGCCCACGGACACCCTCACGAGATCATCCTG |
| | TACTACTACGAGCTGTACCCCACCACCACAATCGCTGTTCTGGCTGCC |
| | GCCAGCATCGTGATCACATCTCTCGTGGGACTGAGCCTGGGCATGTG |
| | TATCTGCGCTCGGCGGAGATGCATCACCCCTTACGAACTTACCCCTG |
| | GCGCCACCATTCCTTTTCTGCTGGGCGTGCTGTGCTGTGCCAGAACT |
| | GCCAAAGCCGCCAGCTATTACGAGGCCGCCACCTACCTGTGGAACGA |
| | GCAGCAACCTCTGTTTTGGCTGCAGCTGCTGATCCCTCTGAGCGCCG |
| | CTATCGTCGTGTGCAACTGTCTGAAGCTGCTGCCCTGTTGCTGCAAGA |
| | CCCTGACCTTTCTGGCCGTGATGAGCATCGGAGCCAGAACCGTGACA |
| | GCCTACGAACACGCCACAGTGATCCCCAATACCGTGGGAGTGCCCTG |
| | CAAGACACTGGTGTCCAGACCTGGCTACAGCCCAATGGTGCTGGAAA |
| | TGGAACTGCAGAGCGTGACCCTGGAACCTGCTCTGTCCCTGGACTAC |
| | ATCACATGCGAGTACAAGACCATCACACCCTCTCCATACGTGAAGTGC |
| | TGTGGCACCGCCGAGTGCAAGGCCAAGAACCTGCCTGACTATAATTG |
| | CAAGGTGTTCACCGGCGTGTACCCCTTCATGTGGGGCGGAGCCTACT |
| | GCTTCTGTGACGCCGAGAATACCCAGCTGTCTGAGGCCCACGTGGAA |
| | AAGAGCGAGAGCTGCAAAACCGAGTTCGCCAGCGCCTATAGAGCCCA |
| | CACAGCCTCTGTGTCCGCCAAGCTGAGAGTGTTCTACCAGGGCAACA |
| | ATATCACCGTGTCCGCCTACGCCAATGGCGACCATGCTGTGACAGTG |
| | GAAGATGCCAAGTTCGTGATCGGCCCACTGAGCAGTGCTTGGAGCCC |
| | CTTCGACAACAAGATCGTGGTGTATAAGGGCGAAGTCTACAACATGGA |
| | CTACCCTCCATTCGGAGCCGGCAGACCTGGACAGTTCGGAGACATCC |
| | AGAGCAGAACCCCTGACAGCAAGGACGTGTACGCCAACACACAGCTG |
| | ATCCTGCAGAGGCCTGCTGCCGGCGCTATTCACGTGCCATATTCTCA |
| | GGCCCCTAGCGGCTTCAAGTATTGGCTGAAAGAGAAGGGCGCCAGCC |
| | TGCAGCACACAGCCCCTTTTGGTTGCCAGATCGCCACCAATCCTGTG |
| | CGGGCCGTGAATTGTGCCGTGGGCAATATCCCTGTGTCCATCGACAT |
| | CCCCGACGCCGCCTTCACAAGAGTGACAGATGCCCCTTCCATCACCG |
| | ACATGTCTTGCGAGGTGGCCAGCTGCACACACTCCAGCGATTTTGGA |
| | GGCGCCGCTGTGATCAAGTACACCGCCAGCAAGAAAGGCAAGTGCG |
| | CCGTGCACAGCGTGACAAACGCAGTGACCATCCGCGAGCCTAACGTG |
| | GACGTGAAGGGAACAGCCCAGCTGCAGATTGCCTTCTCTACAGCCCT |
| | GGCCAGCGCCGAGTTTAAGGTGCAGATTTGCTCTACCCTGGTGCACT |
| | GCAGCGCCACATGTCACCCTCCAAAGGACCACATCGTGAACTACCCC |
| | TCTCCACACACCACACTGGGAGTGCAGGACATCAGCACAACCGCCAT |
| | GAGTTGGGTGCAGAAAATCACAGGCGGCGTTGGCCTGGTGGTGGCC |
| | ATTGCTGCTCTGATCCTGATCATCGTCCTGTGCGTGTCCTTCAGCCGG |
| | CAC |
| SEQ ID NO: | MSLALPVMMCLLANTTFPCSQPPCAPCCYEKKPEETLRMLEDNVMQPGY |
| 2013 | YQLLDSALACSQRRQKRNARENFNVYKVTRPYLAHCPDCGEGHSCHSPI |
| O'nyong- | ALERIRSEATDGTLKIQVSLQIGIKTDDSHDWTKLRYMDSHTPVDADRSGL |
| nyong virus | FVRTSAPCTITGTMGHFILARCPKGETLTVGFVDSRRISHTCMHPFRHEP |
| (strain | PLIGREKFHSRPQHGKELPCSTYVHTTAATAEEIEVHMPPDTPDYTLMTQ |
| MP30) | QAGNVKITVDGQTVRYKCKCDGSNEGLITADKVINNCKVDQCHTAVTNHK |
| ONNV G | KWQYNSPLTPRNSEQGDRKGKIHIPFPLVNTTCRVPKARNPTVTYGKNR |
| gene (amino | VTLLLHPDHPTLLSYRAMGRIPDYHEEWITNKKEISITVPAEGLEVTWGNN |
| acid) | DPYKYWPQLSTNGTAHGHPHEIILYYYELYPTTTIAVLAAASIVITSLVGLSL |
| | GMCICARRRCITPYELTPGATIPFLLGVLCCARTAKAASYYEAATYLWNEQ |
| | QPLFWLQLLIPLSAAIVVCNCLKLLPCCCKTLTFLAVMSIGARTVTAYEHAT |
| | VIPNTVGVPCKTLVSRPGYSPMVLEMELQSVTLEPALSLDYITCEYKTITPS |
| | PYVKCCGTAECKAKNLPDYNCKVFTGVYPFMWGGAYCFCDAENTQLSE |
| | AHVEKSESCKTEFASAYRAHTASVSAKLRVFYQGNNITVSAYANGDHAVT |
| | VEDAKFVIGPLSSAWSPFDNKIVVYKGEVYNMDYPPFGAGRPGQFGDIQ |
| | SRTPDSKDVYANTQLILQRPAAGAIHVPYSQAPSGFKYWLKEKGASLQHT |
| | APFGCQIATNPVRAVNCAVGNIPVSIDIPDAAFTRVTDAPSITDMSCEVAS |
| | CTHSSDFGGAAVIKYTASKKGKCAVHSVTNAVTIREPNVDVKGTAQLQIA |
| | FSTALASAEFKVQICSTLVHCSATCHPPKDHIVNYPSPHTTLGVQDISTTA |
| | MSWVQKITGGVGLVVAIAALILIIVLCVSFSRH |
| SEQ ID NO: | ATGTCTGCCGCTCTGATGATGTGCATCCTGGCCAACACCAGCTTTCCC |
| 2014 | TGCAGCAGCCCTCCTTGCTACCCTTGCTGTTACGAGAAGCAGCCCGA |
| Ross virus | GCAGACCCTGCGGATGCTGGAAGATAACGTGAACAGACCCGGCTACT |
| (strain | ACGAGCTGCTGGAAGCCAGCATGACCTGCCGGAACAGAAGCCGGCA |
| RRV6) RRV | TAGAAGAAGCGTGACCGAGCACTTCAACGTGTACAAGGCCACCAGAC |
| G gene | CTTACCTGGCCTACTGCGCCGATTGCGGCGACGGCTACTTTTGCTATA |
| (nucleic | GCCCCGTGGCCATCGAGAAGATCAGAGATGAGGCCAGCGACGGCAT |
| acid) | GCTGAAGATCCAAGTGTCTGCCCAGATCGGCCTGGACAAGGCCGGAA |
| | CACACGCCCACACCAAGATCAGATATATGGCCGGACACGACGTGCAA |
| | GAGAGCAAGAGGGATAGCCTGAGAGTGTACACCAGCGCCGCCTGTTC |
| | TATCCACGGCACCATGGGCCACTTCATCGTGGCCCATTGTCCACCTG |
| | GCGACTACCTGAAGGTGTCCTTCGAGGATGCCGACAGCCACGTGAAG |
| | GCCTGCAAGGTGCAGTACAAGCACGACCCTTTGCCTGTGGGCCGCGA |
| | GAAGTTTGTTGTGCGGCCTCACTTTGGCGTGGAACTGCCTTGTACCAG |
| | CTACCAGCTGACCACCGCTCCTACCGACGAAGAGATCGACATGCACA |
| | CCCCTCCAGACATCCCCGACAGAACACTGCTGAGCCAGACAGCCGGC |
| | AACGTGAAGATTACAGCCGGCGGACGGACCATCCGGTACAACTGTAC |
| | ATGCGGCAGAGACAACGTGGGCACCACCAGCACCGACAAGACCATCA |
| | ATACCTGCAAGATCGACCAGTGCCACGCCGCCGTGACATCTCACGAC |
| | AAGTGGCAGTTCACAAGCCCCTTCGTGCCCAGAGCCGATCAGACAGC |
| | TAGACGGGGAAAAGTGCACGTGCCATTTCCACTGACCAACGTGACCT |
| | GCAGAGTGCCCCTTGCTAGAGCCCCTGATGTGACCTACGGCAAGAAA |
| | GAAGTGACCCTGAGACTGCACCCTGATCACCCCACACTGTTCAGCTA |
| | CAGAAGCCTGGGAGCCGAGCCTCATCCTTACGAGGAATGGGTTGACA |
| | AGTTCAGCGAGCGGATCATCCCCGTGACCGAAGAGGGCATCGAGTAC |
| | CAGTGGGGCAACAATCCTCCTGTGCGACTGTGGGCCCAGCTGACAAC |
| | AGAGGGAAAACCTCACGGATGGCCCCACGAGATCATCCAGTACTACT |
| | ACGGCCTGTATCCTGCCGCCACAATCGCTGCTGTTTCTGGCGCTTCTC |
| | TGATGGCACTGCTGACACTGGCCGCCACCTGTTGCATGCTGGCCACC |
| | GCTAGACGGAAGTGTCTGACCCCTTACGCTCTGACACCTGGCGCTGT |
| | GGTTCCTCTGACTCTGGGCCTTCTGTGCTGTGCCCCTAGAGCCAATG |
| | CCGCCTCTTTCGCCGAGACAATGGCCTACCTGTGGGACGAGAACAAG |
| | ACCCTGTTCTGGATGGAATTTGCCGCTCCAGCCGCTGCTCTGGCTCT |
| | GCTGGCTTGTTGTATCAAGAGCCTGATCTGCTGCTGCAAGCCCTTCAG |
| | CTTCCTGGTGCTGCTGAGTCTGGGAGCCTCTGCCAAGGCCTATGAGC |
| | ACACAGCCACCATTCCTAACGTCGTGGGCTTCCCCTACAAGGCCCAC |
| | ATCGAGAGAAACGGCTTCAGCCCCATGACACTGCAGCTGGAAGTGGT |
| | GGAAACCAGCCTGGAACCTACACTGAACCTTGAGTACATCACGTGCG |
| | AGTACAAGACCGTGGTGCCCTCTCCATTCATCAAGTGCTGTGGCACCA |
| | GCGAGTGCAGCTCCAAAGAGCAGCCTGACTACCAGTGCAAGGTGTAC |
| | ACAGGCGTGTACCCCTTCATGTGGGGCGGAGCCTACTGCTTCTGCGA |
| | CAGCGAGAATACCCAGCTGAGCGAGGCCTACGTGGACAGATCCGATG |
| | TGTGCAAGCACGATCACGCCAGCGCCTATAAGGCCCATACAGCCAGC |
| | CTGAAAGCCACCATCAGAATCAGCTACGGCACAATCAACCAGACCAC |
| | CGAGGCCTTCGTGAATGGCGAGCACGCCGTGAATGTTGGCGGCAGC |
| | AAGTTCATCTTCGGCCCCATCTCTACCGCTTGGAGCCCTTTCGACAAC |
| | AAGATTGTGGTGTATAAGGACGACGTCTACAACCAGGACTTCCCACCT |
| | TACGGCAGCGGACAGCCTGGCAGATTCGGCGACATTCAGAGCAGAAC |
| | CGTGGAAAGCAAGGACCTGTACGCCAACACAGCCCTGAAGCTGAGCA |
| | GACCTTCTCCTGGCGTGGTGCATGTGCCCTACACACAGACACCTAGC |
| | GGCTTCAAGTACTGGCTGAAAGAGAAGGGCAGCTCCCTGAACACAAA |
| | GGCCCCTTTCGGATGCAAGATCAAGACAAACCCCGTCAGAGCCATGG |
| | ACTGTGCCGTGGGCTCTATCCCCGTGTCTATGGACATCCCTGACTCC |
| | GCCTTCACCAGAGTGGTGGATGCTCCTGCCGTGACAGACCTGTCTTG |
| | TCAGGTGGTCGTGTGCACCCACAGCTCCGATTTTGGCGGAGTGGCCA |
| | CACTGAGCTACAAGACAGACAAGCCTGGCAAGTGCGCCGTGCACAGC |
| | CACAGCAATGTGGCTACACTGCAAGAGGCCACCGTGGACGTGAAAGA |
| | GGATGGCAAAGTCACCGTGCACTTCAGCACAGCCTCTGCCAGCCCCG |
| | CCTTTAAGGTGTCAGTGTGCGACGCCAAGACCACCTGTACAGCCGCA |
| | TGCGAGCCTCCAAAGGACCACATCGTTCCTTACGGCGCCAGCCACAA |
| | CAACCAGGTGTTCCCTGATATGAGCGGCACCGCCATGACCTGGGTTC |
| | AGAGACTGGCTTCTGGACTCGGAGGACTGGCCCTGATTGCTGTCGTG |
| | GTGCTGGTCCTGGTCACCTGTATCACCATGCGGAGA |
| SEQ ID NO: | MSAALMMCILANTSFPCSSPPCYPCCYEKQPEQTLRMLEDNVNRPGYYE |
| 2015 | LLEASMTCRNRSRHRRSVTEHFNVYKATRPYLAYCADCGDGYFCYSPVA |
| Ross virus | IEKIRDEASDGMLKIQVSAQIGLDKAGTHAHTKIRYMAGHDVQESKRDSLR |
| (strain | VYTSAACSIHGTMGHFIVAHCPPGDYLKVSFEDADSHVKACKVQYKHDPL |
| RRV6) RRV | PVGREKFVVRPHFGVELPCTSYQLTTAPTDEEIDMHTPPDIPDRTLLSQTA |
| G gene | GNVKITAGGRTIRYNCTCGRDNVGTTSTDKTINTCKIDQCHAAVTSHDKW |
| (amino acid) | QFTSPFVPRADQTARRGKVHVPFPLTNVTCRVPLARAPDVTYGKKEVTL |
| | RLHPDHPTLFSYRSLGAEPHPYEEWVDKFSERIIPVTEEGIEYQWGNNPP |
| | VRLWAQLTTEGKPHGWPHEIIQYYYGLYPAATIAAVSGASLMALLTLAATC |
| | CMLATARRKCLTPYALTPGAVVPLTLGLLCCAPRANAASFAETMAYLWDE |
| | NKTLFWMEFAAPAAALALLACCIKSLICCCKPFSFLVLLSLGASAKAYEHT |
| | ATIPNVVGFPYKAHIERNGFSPMTLQLEVVETSLEPTLNLEYITCEYKTVVP |
| | SPFIKCCGTSECSSKEQPDYQCKVYTGVYPFMWGGAYCFCDSENTQLS |
| | EAYVDRSDVCKHDHASAYKAHTASLKATIRISYGTINQTTEAFVNGEHAVN |
| | VGGSKFIFGPISTAWSPFDNKIVVYKDDVYNQDFPPYGSGQPGRFGDIQS |
| | RTVESKDLYANTALKLSRPSPGVVHVPYTQTPSGFKYWLKEKGSSLNTK |
| | APFGCKIKTNPVRAMDCAVGSIPVSMDIPDSAFTRVVDAPAVTDLSCQVV |
| | VCTHSSDFGGVATLSYKTDKPGKCAVHSHSNVATLQEATVDVKEDGKVT |
| | VHFSTASASPAFKVSVCDAKTTCTAACEPPKDHIVPYGASHNNQVFPDM |
| | SGTAMTWVQRLASGLGGLALIAVVVLVLVTCITMRR |
| SEQ ID NO: | ATGTCACTAGTTACAGCGCTGTGCGTGCTTTCGAATGTCACGTTCCCA |
| 2016 | TGCGACAAACCACCCGTGTGCTATTCACTGACGCCAGAACGAACACT |
| Western | CGACGTGCTCGAAGAGAACGTCGACAATCCAAATTACGACACGCTGC |
| equine | TGGAGAACGTCTTGAAATGTCCATCACGCCGGCCCAAACGAAGCATTA |
| encephalitis | CCGATGACTTCACACTGACCAGTCCCTACCTGGGGTTCTGCCCGTATT |
| virus (strain | GCAGACACTCAACGCCGTGTTTCAGCCCAATAAAAATTGAGAACGTGT |
| CBA83) | GGGACGAATCTGATGATGGATCGATTAGAATCCAGGTCTCGGCACAAT |
| WEEV G | TCGGCTACAATCAGGCAGGCACTGCGGATGTCACCAAATTCCGTTACA |
| gene | TGTCTTTCGACCACGACCATGACATCAAGGAAGACAGTATGGAGAAAA |
| (nucleic | TAGCTATCAGCACATCTGGACCCTGCCGTCGTCTTGGCCACAAAGGG |
| acid) | TACTTCCTGTTAGCTCAATGTCCTCCAGGTGACAGTGTAACCGTCAGT |
| | ATCACGAGCGGAGCATCTGAGAATTCATGCACCGTGGAGAAAAAGAT |
| | CAGGAGGAAGTTTGTCGGTAGAGAGGAGTACTTGTTCCCACCCGTCC |
| | ATGGAAAGCTGGTAAAGTGCCACGTTTACGATCACTTGAAGGAGACGT |
| | CTGCCGGGTACATAACCATGCACAGGCCAGGCCCACACGCGTATAAG |
| | TCCTATCTGGAGGAAGCGTCAGGCGAAGTGTACATTAAACCACCTTCT |
| | GGCAAGAACGTCACCTACGAATGTAAGTGTGGCGACTACAGCACAGG |
| | TATCGTGAGCACGCGAACGAAGATGAACGGCTGCACTAAAGCAAAAC |
| | AGTGCATTGCCTACAAGAGCGACCAAACGAAATGGGTCTTCAACTCGC |
| | CGGATCTTATTAGGCACACAGACCACTCAGTGCAAGGTAAATTGCACA |
| | TTCCATTCCGCTTGACACCGACAGTCTGCCCGGTTCCGTTAGCTCACA |
| | CGCCTACAGTCACGAAGTGGTTCAAAGGCATCACCCTCCACCTGACT |
| | GCAATGCGACCAACATTGCTGACAACGAGAAAATTGGGGCTGCGAGC |
| | AGACGCAACAGCAGAATGGATTACAGGGTCTACATCCAGGAATTTTTC |
| | TGTGGGGCGAGAAGGGCTGGAGTACGTATGGGGTAACCATGAACCA |
| | GTCAGAGTCTGGGCCCAGGAGTCGGCACCAGGCGACCCACATGGAT |
| | GGCCGCATGAGATCATCATCCACTATTATCATCGGCATCCAGTCTACA |
| | CTGTCATTGTGCTGTGTGGTGTCGCTCTTGCTATCCTGGTAGGCACTG |
| | CATCATCAGCAGCTTGCATCGCCAAAGCAAGAAGAGACTGCCTGACG |
| | CCATACGCGCTTGCACCGAACGCAACGGTACCCACAGCATTAGCGGT |
| | TTTGTGCTGCATTCGGCCAACCAACGCTGAAACATTTGGAGAAACTTT |
| | GAACCATCTGTGGTTTAACAACCAACCGTTTCTCTGGGCACAGTTGTG |
| | CATTCCTCTGGCAGCGCTTGTTATTCTGTTCCGCTGCTTTTCATGCTG |
| | CATGCCTTTTTTATTGGTTGCAGGCGTCTGCCTGGGGAAGGTAGACG |
| | CCTTCGAACATGCGACCACTGTGCCAAATGTTCCGGGGATCCCGTATA |
| | AGGCGTTGGTCGAACGCGCAGGTTACGCGCCACTTAACCTGGAGATC |
| | ACGGTCGTCTCATCGGAATTAACACCTTCAACTAACAAGGAGTACGTG |
| | ACCTGCAAATTCCACACAGTCATTCCTTCACCACAAGTTAAATGCTGC |
| | GGGTCCCTCGAGTGCAAGGCATCCTCAAAGGCGGATTACACATGCCG |
| | CGTTTTTGGCGGTGTGTACCCTTTCATGTGGGGAGGCGCACAATGCTT |
| | CTGTGACAGTGAGAACACACAACTGAGTGAGGCGTACGTCGAGTTCG |
| | CTCCAGACTGCACTATAGATCACGCAGTCGCACTAAAAGTTCACACAG |
| | CTGCTCTGAAAGTCGGCCTGCGTATAGTATACGGCAACACCACCGCG |
| | CACCTGGATACGTTTGTCAATGGCGTCACGCCAGGTTCCTCACGGGA |
| | CCTGAAGGTCATAGCAGGGCCGATATCAGCCGCTTTTTCACCCTTTGA |
| | CCATAAGGTCGTCATCAGAAAGGGGCTTGTTTACAACTACGACTTCCC |
| | TGAGTATGGAGCTATGAAACCAGGAGCGTTCGGCGATATTCAAGCATC |
| | CTCGCTTGATGCTACAGACATAGTAGCCCGCACTGACATACGGCTGCT |
| | GAAGCCTTCTGTCAAGAACATCCACGTCCCCTACACCCAAGCAGTATC |
| | AGGGTATGAAATGTGGAAGAACAACTCAGGACGACCCCTGCAAGAAA |
| | CAGCACCATTTGGATGTAAAATTGAAGTGGAGCCTCTGCGAGCGTCTA |
| | ACTGTGCTTACGGGCACATCCCTATCTCGATTGACATCCCTGATGCAG |
| | CTTTTGTGAGATCATCAGAATCACCAACAATTTTAGAAGTTAGCTGCAC |
| | AGTAGCAGACTGCATTTATTCTGCAGACTTTGGTGGTTCTCTAACATTA |
| | CAGTACAAAGCTGACAGGGAGGGACATTGTCCAGTTCACTCCCACTC |
| | CACGACAGCTGTTTTGAAGGAAGCGACCACACATGTGACTGCCGTAG |
| | GCAGCATAACACTACATTTTAGCACATCGAGCCCACAAGCAAATTTTAT |
| | AGTTTCGCTATGCGGCAAGAAGTCCACCTGCAATGCTGAATGTAAACC |
| | ACCGGCCGACCACATAATTGGAGAACCACATAAAGTCGACCAAGAATT |
| | CCAGGCGGCAGTTTCCAAAACATCTTGGAACTGGCTGCTTGCACTGTT |
| | TGGGGGAGCATCATCCCTCATTGTTGTAGGACTTATAGTGTTGGTCTG |
| | CAGCTCTATGCTTATAAACACACGTAGATAA |
| SEQ ID NO: | MSLVTALCVLSNVTFPCDKPPVCYSLTPERTLDVLEENVDNPNYDTLLEN |
| 2017 | VLKCPSRRPKRSITDDFTLTSPYLGFCPYCRHSTPCFSPIKIENVWDESDD |
| Western | GSIRIQVSAQFGYNQAGTADVTKFRYMSFDHDHDIKEDSMEKIAISTSGPC |
| equine | RRLGHKGYFLLAQCPPGDSVTVSITSGASENSCTVEKKIRRKFVGREEYL |
| encephalitis | FPPVHGKLVKCHVYDHLKETSAGYITMHRPGPHAYKSYLEEASGEVYIKP |
| virus (strain | PSGKNVTYECKCGDYSTGIVSTRTKMNGCTKAKQCIAYKSDQTKWVFNS |
| CBA83) | PDLIRHTDHSVQGKLHIPFRLTPTVCPVPLAHTPTVTKWFKGITLHLTAMR |
| WEEV G | PTLLTTRKLGLRADATAEWITGSTSRNFSVGREGLEYVWGNHEPVRVWA |
| gene (amino | QESAPGDPHGWPHEIIIHYYHRHPVYTVIVLCGVALAILVGTASSAACIAKA |
| acid) | RRDCLTPYALAPNATVPTALAVLCCIRPTNAETFGETLNHLWFNNQPFLW |
| | AQLCIPLAALVILFRCFSCCMPFLLVAGVCLGKVDAFEHATTVPNVPGIPY |
| | KALVERAGYAPLNLEITVVSSELTPSTNKEYVTCKFHTVIPSPQVKCCGSL |
| | ECKASSKADYTCRVFGGVYPFMWGGAQCFCDSENTQLSEAYVEFAPDC |
| | TIDHAVALKVHTAALKVGLRIVYGNTTAHLDTFVNGVTPGSSRDLKVIAGPI |
| | SAAFSPFDHKWIRKGLVYNYDFPEYGAMKPGAFGDIQASSLDATDIVAR |
| | TDIRLLKPSVKNIHVPYTQAVSGYEMWKNNSGRPLQETAPFGCKIEVEPL |
| | RASNCAYGHIPISIDIPDAAFVRSSESPTILEVSCTVADCIYSADFGGSLTLQ |
| | YKADREGHCPVHSHSTTAVLKEATTHVTAVGSITLHFSTSSPQANFIVSLC |
| | GKKSTCNAECKPPADHIIGEPHKVDQEFQAAVSKTSWNWLLALFGGASS |
| | LIVVGLIVLVCSSMLINTRR. |
| SEQ ID NO: | ATGAGCCTGGCCACAGTGATGTGCGTGCTGGCCAACATCACCTTTCC |
| 2018 | ATGCGACCAGCCACCTTGCATGCCCTGCTGCTACGAGAAGAACCCTC |
| Eastern | ACGAGACACTGACCATGCTGGAACAGAACTACGACAGCCGGGCCTAC |
| equine | GACCAGCTGCTGGATGCTGCCGTGAAGTGCAACGCCAGACGGACCA |
| encephalitis | GACGCGATCTGGATACCCACTTCACCCAGTACAAGCTGGCCAGACCT |
| virus (strain | TATATCGCCGACTGTCCCAACTGCGGCCACAGCAGATGTGATAGCCC |
| Pe6) EEEV | TATCGCCATCGAGGAAGTGCGGGGCGACGCTCATGCTGGCGTTATCA |
| G gene | GAATCCAGACCAGCGCCATGTTCGGCCTGAAAACCGATGGCGTGGAC |
| (nucleic | CTGGCCTACATGAGCTTCATGAACGGCAAGACCCAGAAGTCCATCAA |
| acid) | GATCGACAACCTGCATGTGCGGACAAGCGCCCCTTGTAGCCTGGTGT |
| | CTCACCACGGCTACTACATCCTGGCTCAGTGCCCTCCAGGCGACACA |
| | GTGACAGTGGGCTTTCACGACGGCCCCAACAGACACACATGTACTGT |
| | GGCCCACAAGGTGGAATTTCGGCCCGTGGGCAGAGAGAAGTACAGA |
| | CACCCTCCTGAGCACGGCGTGGAACTGCCCTGCAATAGATACACCCA |
| | CAAGAGAGCCGACCAGGGCCACTACGTGGAAATGCATCAGCCTGGAC |
| | TGGTGGCCGATCACAGCCTGCTGTCTATCCACAGCGCCAAAGTGAAG |
| | ATCACAGTGCCCAGCGGAGCCCAAGTGAAGTACTACTGCAAGTGCCC |
| | CGATGTGCGGAAGGGCATCACAAGCAGCGATCACACCACCACCTGTA |
| | CCGACGTGAAGCAGTGCAGAGCCTACCTGATCGATAACAAGAAATGG |
| | GTCTACAACAGCGGCAGACTGCCCAGAGGCGAGGGCGATACCTTTAA |
| | GGGAAAGCTGCACGTGCCCTTCGTGCCTGTGAAGGCCAAATGTATCG |
| | CCACACTGGCCCCTGAGCCTCTGGTGGAACACAAGCACAGAACCCTG |
| | ATCCTGCATCTGCACCCTGATCACCCCACACTGCTGACCACAAGATCC |
| | CTGGGCTCCGACGCCAATCCTACCAGACAGTGGATCGAGAGGCCCAC |
| | CACCGTGAACTTTACCGTGACCGGCGAGGGCCTTGAGTACACCTGGG |
| | GAAATCACCCACCTAAGAGAGTGTGGGCCCAAGAGTCTGGCGAGGGC |
| | AATCCTCATGGATGGCCTCACGAGGTGGTCGTGTACTACTACAACAGA |
| | TACCCTCTGACCACCATCATCGGCCTGTGCACCTGTGTGGCCATCATC |
| | ATGGTGTCCTGCGTGACCTCTGTGTGGCTGCTGTGCAGGACCAGAAA |
| | CCTGTGCATCACCCCTTATAAGCTGGCCCCTAACGCTCAGGTGCCAAT |
| | CCTGCTGGCTCTGCTGTGCTGCATCAAGCCCACCAGAGCCGATGATA |
| | CCCTGCAGGTCCTGAATTACCTGTGGAACAACAACCAGAACTTCTTCT |
| | GGATGCAGACGCTGATCCCTCTGGCCGCTCTGATCGTGTGCATGCGG |
| | ATGCTGAGATGCCTGTTCTGTTGCGGCCCTGCCTTCCTGCTTGTTTGT |
| | GGTGCTCTTGGCGCCGCTGCCTATGAACACACAGCCGTGATGCCCAA |
| | CAAAGTGGGCATCCCCTACAAGGCCCTGGTGGAAAGACCTGGCTATG |
| | CTCCCGTGCACCTCCAGATCCAGCTGGTCAACACCAGAATCATCCCC |
| | AGCACCAACTTGGAGTACATCACGTGCAAGTACAAGACCAAGGTGCC |
| | CTCTCCAGTGGTCAAGTGTTGTGGCGCTACCCAGTGCACCAGCAAGC |
| | CCCATCCTGATTACCAGTGCCAGGTGTTCAGCGGCGTGTACCCCTTTA |
| | TGTGGGGCGGAGCCTACTGCTTCTGCGACACCGAGAATACCCAGATG |
| | AGCGAGGCCTACGTCGAGCGGAGCGAGGAATGTTCTATCGACCACGC |
| | CAAGGCCTATAAGGTGCACACCGGAACAGTGCAGGCCATGGTCAATA |
| | TCACCTACGGCTCCGTGTCTTGGAGAAGCGCCGACGTGTACGTGAAC |
| | GGCGAAACCCCTGCCAAGATTGGCGACGCCAAGCTGATCATCGGACC |
| | CCTGAGTTCTGCTTGGAGCCCCTTTGATAACAAGGTCGTGGTGTACG |
| | GCCACGAGGTCTACAATTACGACTTCCCCGAGTACGGCACAGGCAAG |
| | GCTGGATCTTTTGGCGACCTGCAGAGCAGAACCAGCACCTCCAATGA |
| | CCTGTACGCCAACACCAACCTGAAGCTGCAGAGGCCACAGGCCGGAA |
| | TCGTGCACACACCCTTTACACAGGTCCCCAGCGGCTTCGAGAGATGG |
| | AAGAAGGATAAGGGCGCTCCCCTGAACGACGTGGCCCCTTTTGGCTG |
| | CTCTATCGCCCTGGAACCTCTGAGAGCCGAGAATTGTGCCGTGGGCT |
| | CTATCCCCATCAGCATCGACATTCCCGACGCCGCCTTTACCAGGATCA |
| | GCGAGACACCTACCGTGTCCGATCTGGAATGCAAGATCACCGAGTGC |
| | ACCTACGCCTTCGACTTCGGCGGAATTGCCACCGTGGCCTACAAGTC |
| | TAGCAAGGCCGGCAACTGCCCTATTCACTCTCCTAGCGGAGTGGCCG |
| | TGATCAAAGAAAACGACGTGACCCTGGCCGAGAGCGGCAGCTTCACC |
| | TTTCACTTCAGCACCGCCAACATTCACCCCGCCTTCAAGCTGCAAGTG |
| | TGCACATCTGCCGTGACCTGCAAGGGCGATTGCAAGCCACCAAAGGA |
| | CCACATCGTGGACTACCCCGCTCAGCACACCGAGAGCTTTACAAGCG |
| | CCATCAGCGCCACAGCCTGGTCCTGGATTAAGGTGCTCGTCGGCGGA |
| | ACCAGCGCCTTTATTGTGCTGGGACTGATCGCCACTGCCGTGGTGGC |
| | TCTCGTGCTGTTTTTTCACCGGCACTGA |
| SEQ ID NO: | MSLATVMCVLANITFPCDQPPCMPCCYEKNPHETLTMLEQNYDSRAYDQ |
| 2019 | LLDAAVKCNARRTRRDLDTHFTQYKLARPYIADCPNCGHSRCDSPIAIEEV |
| Eastern | RGDAHAGVIRIQTSAMFGLKTDGVDLAYMSFMNGKTQKSIKIDNLHVRTS |
| equine | APCSLVSHHGYYILAQCPPGDTVTVGFHDGPNRHTCTVAHKVEFRPVGR |
| encephalitis | EKYRHPPEHGVELPCNRYTHKRADQGHYVEMHQPGLVADHSLLSIHSAK |
| virus (strain | VKITVPSGAQVKYYCKCPDVRKGITSSDHTTTCTDVKQCRAYLIDNKKWV |
| Pe6) EEEV | YNSGRLPRGEGDTFKGKLHVPFVPVKAKCIATLAPEPLVEHKHRTLILHLH |
| G gene | PDHPTLLTTRSLGSDANPTRQWIERPTTVNFTVTGEGLEYTWGNHPPKR |
| (amino acid) | VWAQESGEGNPHGWPHEVVVYYYNRYPLTTIIGLCTCVAIIMVSCVTSVW |
| | LLCRTRNLCITPYKLAPNAQVPILLALLCCIKPTRADDTLQVLNYLWNNNQ |
| | NFFWMQTLIPLAALIVCMRMLRCLFCCGPAFLLVCGALGAAAYEHTAVMP |
| | NKVGIPYKALVERPGYAPVHLQIQLVNTRIIPSTNLEYITCKYKTKVPSPVV |
| | KCCGATQCTSKPHPDYQCQVFSGVYPFMWGGAYCFCDTENTQMSEAY |
| | VERSEECSIDHAKAYKVHTGTVQAMVNITYGSVSWRSADVYVNGETPAKI |
| | GDAKLIIGPLSSAWSPFDNKVVVYGHEVYNYDFPEYGTGKAGSFGDLQS |
| | RTSTSNDLYANTNLKLQRPQAGIVHTPFTQVPSGFERWKKDKGAPLNDV |
| | APFGCSIALEPLRAENCAVGSIPISIDIPDAAFTRISETPTVSDLECKITECTY |
| | AFDFGGIATVAYKSSKAGNCPIHSPSGVAVIKENDVTLAESGSFTFHFSTA |
| | NIHPAFKLQVCTSAVTCKGDCKPPKDHIVDYPAQHTESFTSAISATAWSWI |
| | KVLVGGTSAFIVLGLIATAVVALVLFFHRH |
| SEQ ID NO: | ATGTCCCTGGTCACCACCATGTGTCTGCTGGCCAACGTGACATTCCCT |
| 2020 | TGCGCTCAGCCTCCTATCTGCTACGACAGAAAGCCCGCCGAGACACT |
| Venezuelan | GGCTATGCTGAGCGTGAACGTGGACAACCCCGGCTACGATGAACTGC |
| equine | TGGAAGCCGCCGTGAAGTGCCCTGGCAGAAAGAGAAGAAGCACCGA |
| encephalitis | GGAACTGTTCAACGAGTACAAGCTGACCCGGCCTTACATGGCCCGGT |
| virus (strain | GCATTAGATGTGCCGTGGGCAGCTGTCACAGCCCTATTGCCATTGAG |
| Tc83) VEEV | GCCGTGAAAAGCGACGGCCACGATGGCTACGTCAGACTGCAGACAAG |
| G gene | CAGCCAGTACGGCCTGGACAGCAGCGGCAATCTGAAGGGCAGAACC |
| (nucleic | ATGAGATACGACATGCACGGCACCATCAAAGAGATCCCTCTGCACCA |
| acid) | GGTGTCCCTGTATACCAGCAGACCCTGCCACATCGTGGATGGCCACG |
| | GCTACTTTCTGCTGGCTAGATGTCCTGCCGGCGACAGCATCACCATG |
| | GAGTTCAAGAAAGACAGCGTGCGGCACTCCTGCAGCGTGCCCTACGA |
| | AGTGAAGTTCAACCCTGTGGGCAGAGAGCTGTATACACACCCTCCAG |
| | AGCACGGCGTGGAACAGGCTTGTCAGGTGTACGCCCACGACGCCCA |
| | GAATAGAGGCGCCTACGTGGAAATGCATCTGCCCGGCAGCGAAGTGG |
| | ATAGCAGCCTGGTTTCTCTGAGCGGCAGCAGCGTGACAGTGACACCT |
| | CCTGATGGAACAAGCGCCCTGGTGGAATGTGAATGCGGCGGCACCAA |
| | GATCAGCGAGACAATCAACAAGACCAAGCAGTTCAGCCAGTGCACCA |
| | AGAAAGAGCAGTGCCGGGCCTACCGGCTGCAGAACGACAAATGGGT |
| | CTACAACAGCGACAAGCTGCCCAAGGCTGCTGGCGCTACACTGAAGG |
| | GAAAACTGCACGTGCCATTTCTGCTCGCCGACGGCAAATGTACCGTG |
| | CCTCTTGCTCCCGAGCCTATGATCACCTTCGGCTTCAGAAGCGTGTCC |
| | CTGAAGCTGCACCCCAAGAATCCCACCTACCTGATCACCAGACAGCT |
| | GGCCGATGAGCCCCACTACACACACGAGCTGATCTCTGAGCCTGCCG |
| | TGCGGAATTTCACCGTGACCGAGAAAGGCTGGGAGTTCGTGTGGGGC |
| | AATCACCCTCCTAAGCGGTTCTGGGCCCAAGAGACAGCCCCTGGAAA |
| | TCCTCACGGACTGCCTCACGAAGTGATCACCCACTACTACCACAGATA |
| | CCCCATGTCCACCATCCTGGGCCTGAGCATCTGTGCCGCCATTGCCA |
| | CAGTGTCTGTGGCCGCTTCTACCTGGCTGTTTTGCCGGTCAAGAGTG |
| | GCCTGTCTGACCCCTTACAGACTGACCCCTAACGCCAGGATTCCTTTC |
| | TGCCTGGCCGTGCTGTGCTGCGCCAGAACAGCTAGAGCCGAGACAAC |
| | ATGGGAGAGCCTGGACCACCTGTGGAACAACAACCAGCAGATGTTCT |
| | GGATTCAGCTGCTGATCCCACTGGCCGCACTGATCGTGGTCACAAGA |
| | CTGCTGAGATGCGTGTGCTGCGTGGTGCCCTTTCTGGTTATGGCAGG |
| | CGCAGCTGGTGCCGGCGCTTATGAACATGCCACCACAATGCCTAGCC |
| | AGGCCGGCATCAGCTACAACACCATCGTGAACAGAGCCGGCTACGCT |
| | CCCCTGCCTATCAGCATCACACCCACAAAGATCAAGCTGATCCCCACC |
| | GTGAACCTCGAATACGTGACCTGCCACTACAAGACCGGCATGGACAG |
| | CCCTGCCATCAAGTGCTGTGGCAGCCAAGAGTGCACCCCTACCTACA |
| | GACCTGACGAGCAGTGCAAGGTGTTCACCGGCGTGTACCCCTTTATG |
| | TGGGGCGGAGCCTACTGCTTCTGCGACACCGAGAATACTCAGGTGTC |
| | CAAGGCCTACGTGATGAAGTCCGACGACTGTCTGGCCGATCACGCCG |
| | AAGCCTATAAGGCCCATACAGCCAGCGTGCAGGCCTTCCTGAATATCA |
| | CAGTGGGCGAGCACTCCATCGTGACCACCGTGTATGTGAACGGCGAG |
| | ACACCCGTGAACTTCAACGGCGTGAAGATCACCGCCGGACCTCTGTC |
| | TACAGCCTGGACACCCTTCGACCGGAAGATCGTGCAGTATGCCGGCG |
| | AAATCTACAACTACGACTTCCCCGAGTATGGCGCCGGACAGCCTGGC |
| | GCCTTTGGCGATATTCAGAGCAGAACCGTGTCCAGCAGCGACCTGTA |
| | CGCCAACACCAATCTGGTGCTGCAGAGGCCTAAAGCCGGCGCTATCC |
| | ATGTGCCTTACACACAGGCCCCTTCCGGCTTTGAGCAGTGGAAGAAG |
| | GATAAGGCCCCTAGCCTGAAGTTTACAGCCCCTTTCGGCTGCGAGAT |
| | ATACACAAACCCCATCCGGGCCGAGAATTGCGCCGTGGGATCTATCC |
| | CTCTGGCCTTCGACATCCCCGACGCACTGTTCACCAGAGTGTCCGAG |
| | ACTCCCACACTGTCTGCCGCCGAGTGTACCCTGAACGAGTGTGTGTA |
| | CTCCAGCGACTTCGGCGGAATCGCCACAGTGAAGTACTCCGCCAGCA |
| | AGAGCGGAAAGTGCGCTGTGCATGTGCCTAGCGGAACCGCCACTCTG |
| | AAAGAGGCTGCCGTTGAGCTGACAGAGCAGGGCTCTGCCACCATCCA |
| | CTTCAGCACCGCCAACATTCACCCCGAGTTCCGGCTGCAAATCTGCA |
| | CCTCCTACGTGACATGCAAGGGCGACTGTCACCCTCCAAAGGATCAC |
| | ATCGTGACACATCCCCAGTATCACGCCCAGACCTTTACTGCCGCCGT |
| | GTCTAAAACCGCCTGGACCTGGCTGACATCTCTGCTCGGAGGATCTG |
| | CCGTGATCATCATCATCGGACTGGTGCTGGCCACAATCGTGGCTATGT |
| | ACGTGCTGACCAACCAGAAGCACAAC |
| SEQ ID NO: | MSLVTTMCLLANVTFPCAQPPICYDRKPAETLAMLSVNVDNPGYDELLEA |
| 2021 | AVKCPGRKRRSTEELFNEYKLTRPYMARCIRCAVGSCHSPIAIEAVKSDG |
| Venezuelan | HDGYVRLQTSSQYGLDSSGNLKGRTMRYDMHGTIKEIPLHQVSLYTSRP |
| equine | CHIVDGHGYFLLARCPAGDSITMEFKKDSVRHSCSVPYEVKFNPVGRELY |
| encephalitis | THPPEHGVEQACQVYAHDAQNRGAYVEMHLPGSEVDSSLVSLSGSSVT |
| virus (strain | VTPPDGTSALVECECGGTKISETINKTKQFSQCTKKEQCRAYRLQNDKW |
| Tc83) VEEV | VYNSDKLPKAAGATLKGKLHVPFLLADGKCTVPLAPEPMITFGFRSVSLKL |
| G gene | HPKNPTYLITRQLADEPHYTHELISEPAVRNFTVTEKGWEFVWGNHPPKR |
| (amino acid) | FWAQETAPGNPHGLPHEVITHYYHRYPMSTILGLSICAAIATVSVAASTWL |
| | FCRSRVACLTPYRLTPNARIPFCLAVLCCARTARAETTWESLDHLWNNN |
| | QQMFWIQLLIPLAALIWTRLLRCVCCVVPFLVMAGAAGAGAYEHATTMP |
| | SQAGISYNTIVNRAGYAPLPISITPTKIKLIPTVNLEYVTCHYKTGMDSPAIK |
| | CCGSQECTPTYRPDEQCKVFTGVYPFMWGGAYCFCDTENTQVSKAYV |
| | MKSDDCLADHAEAYKAHTASVQAFLNITVGEHSIVTTVYVNGETPVNFNG |
| | VKITAGPLSTAWTPFDRKIVQYAGEIYNYDFPEYGAGQPGAFGDIQSRTV |
| | SSSDLYANTNLVLQRPKAGAIHVPYTQAPSGFEQWKKDKAPSLKFTAPFG |
| | CEIYTNPIRAENCAVGSIPLAFDIPDALFTRVSETPTLSAAECTLNECVYSS |
| | DFGGIATVKYSASKSGKCAVHVPSGTATLKEAAVELTEQGSATIHFSTANI |
| | HPEFRLQICTSYVTCKGDCHPPKDHIVTHPQYHAQTFTAAVSKTAWTWLT |
| | SLLGGSAVIIIIGLVLATIVAMYVLTNQKHN |
| SEQ ID NO: | ATGAACATCCCCTGCTTCGCCGTGATCCTGAGCCTGGCCACAACACAT |
| 2022 | AGCCTGGGCGAGTTCCCTCTGTATACAATCCCCGAGAAGATCGAGAA |
| Mokola | GTGGACCCCTATCGACATGATCCACCTGAGCTGCCCCAACAACATGC |
| virus MOKV | TGAGCGAGGAAGAGGGCTGCAACACAGAGAGCCCCTTCACCTACTTC |
| G gene | GAGCTGAAGTCCGGCTATCTGGCCCACCAGAAGGTGCCCGGCTTTAC |
| (nucleic | ATGTACCGGCGTGGTCAATGAGGCCGAGACATACACCAACTTCGTGG |
| acid) | GCTACGTGACCACCACCTTCAAGCGGAAGCACTTCAAGCCTACCGTG |
| | GCCGCCTGTAGGGACGCCTACAACTGGAAAGTGTCCGGCGATCCCAG |
| | ATACGAGGAAAGCCTGCACACCCCTTATCCTGACAGCAGCTGGCTGA |
| | GAACCGTGACAACCACCAAAGAGGCCCTGCTGATCATCAGCCCCAGC |
| | ATCGTGGAAATGGACATCTACGGCAGAACCCTGCACAGCCCTATGTTC |
| | CCTAGCGGCAAGTGCAGCAAGCTGTACCCTAGCGTGCCCAGCTGCAC |
| | CACCAACCACGATTACACACTGTGGCTGCCCGAGGACAGCAGCCTGT |
| | CTCTGATCTGCGACATCTTCACCAGCAGCAGCGGCCAGAAAGCCATG |
| | AACGGCAGCAGAATCTGCGGCTTCAAGGACGAGCGGGGCTTCTACAG |
| | AAGCCTGAAGGGCAGCTGCAAGCTGACACTGTGTGGCAAGCCTGGCA |
| | TCAGACTGTTCGATGGCACCTGGGTGTCCTTCACCAAGCCTGATGTG |
| | CACGTGTGGTGCACCCCTAACCAGCTCGTGAACATCCACAACGACCG |
| | GCTGGACGAGGTGGAACACCTGATCGTGGACGACATCATCAAGAAAC |
| | GGGAAGAGTGCCTGGACACCCTGGAAACCATCCTGATGAGCCAGAGC |
| | GTGTCCTTTCGGCGGCTGAGCCACTTCAGAAAGCTGGTGCCTGGCTA |
| | CGGCAAGGCCTACACAATCCTGAACGGCTCCCTGATGGAAACGAACG |
| | TGTACTACAAGCGCGTGGACAGATGGGCCGACATCCTGCCTAGTAGA |
| | GGCTGCCTGAAAGTGGGCCAGCAGTGCATGGACCCTGTGAAGGGCG |
| | TGCTGTTCAACGGAATCATCAAGGGCCCCGACGGCCAGATTCTGATC |
| | CCTGAGATGCAGAGCGAGCAGCTGAAGCAGCACATGGATCTGCTGAA |
| | GGCCGCCATGTTTCCTCTGCGGCACCCTCTGATCAACCGCGAGGCCG |
| | TGTTTAAGAAGGACGGCAACGCCGACGACTTCGTGGACCTGCATATG |
| | CCCGACGTGCAGAAAAGCGTGTCCGATGTGGATCTGGGCCTGCCTCA |
| | CTGGGGATTTTGGCTGCTTGTGGGCGCTACCGTGGTGGCCTTTGTGG |
| | TTCTGGCTTGCCTGCTGAGAGTGTGCTGCAGACGGATGCGGAGAAGA |
| | AGAAGCCTGCGGGCTACACAGGACATCCCTCTGTCTGTTGCTCCCGC |
| | TCCTGTGCCTAGAGCCAAGGTTGTGTCTAGCTGGGAGAGCAGCAAGG |
| | GCCTTCCTGGAACA |
| SEQ ID NO: | MNIPCFAVILSLATTHSLGEFPLYTIPEKIEKWTPIDMIHLSCPNNMLSEEEG |
| 2023 | CNTESPFTYFELKSGYLAHQKVPGFTCTGVVNEAETYTNFVGYVTTTFKR |
| Mokola | KHFKPTVAACRDAYNWKVSGDPRYEESLHTPYPDSSWLRTVTTTKEALLI |
| virus MOKV | ISPSIVEMDIYGRTLHSPMFPSGKCSKLYPSVPSCTTNHDYTLWLPEDSSL |
| G gene | SLICDIFTSSSGQKAMNGSRICGFKDERGFYRSLKGSCKLTLCGKPGIRLF |
| (amino acid) | DGTWVSFTKPDVHVWCTPNQLVNIHNDRLDEVEHLIVDDIIKKREECLDTL |
| | ETILMSQSVSFRRLSHFRKLVPGYGKAYTILNGSLMETNVYYKRVDRWAD |
| | ILPSRGCLKVGQQCMDPVKGVLFNGIIKGPDGQILIPEMQSEQLKQHMDL |
| | LKAAMFPLRHPLINREAVFKKDGNADDFVDLHMPDVQKSVSDVDLGLPH |
| | WGFWLLVGATVVAFVVLACLLRVCCRRMRRRRSLRATQDIPLSVAPAPV |
| | PRAKVVSSWESSKGLPGT |
| SEQ ID NO: | ATGAAGTGCCTGCTGTACCTGGCCTTCCTGTTCATCGGCGTGAACTGC |
| 2024 | AAGTTTACCATCGTGTTCCCTCACAACCAGAAAGGCAACTGGAAGAAC |
| Vessiculo | GTGCCCAGCAACTACCACTACTGCCCCAGCAGCAGCGACCTGAACTG |
| stomatis | GCACAATGACCTGATCGGCACAGCCCTGCAAGTGAAGATGCCCAAGA |
| virus VSV G | GCCACAAGGCCATCCAGGCCGATGGATGGATGTGCCACGCCAGCAAA |
| gene | TGGGTCACAACCTGCGACTTCCGTTGGTACGGCCCCAAGTACATCAC |
| (nucleic | CCACAGCATCCGCAGCTTCACCCCTAGCGTGGAACAGTGCAAAGAGA |
| acid) | GCATCGAGCAGACCAAGCAAGGCACCTGGCTGAACCCTGGATTCCCA |
| | CCTCAGAGCTGTGGCTACGCCACTGTGACAGATGCCGAGGCCGTGAT |
| | CGTGCAAGTGACACCTCATCACGTGCTGGTGGACGAGTACACCGGCG |
| | AGTGGGTTGACAGCCAGTTCATCAACGGCAAGTGCTCCAACTACATCT |
| | GCCCCACCGTGCACAACAGCACCACCTGGCACAGCGACTACAAAGTG |
| | AAGGGCCTGTGCGACAGCAACCTGATCAGCATGGACATCACCTTTTTC |
| | AGCGAGGACGGCGAGCTGAGCAGCCTGGGAAAAGAAGGCACCGGCT |
| | TCAGAAGCAACTACTTCGCCTATGAGACAGGCGGCAAGGCCTGCAAG |
| | ATGCAGTATTGCAAGCACTGGGGCGTCAGACTGCCTAGCGGAGTTTG |
| | GTTCGAGATGGCCGACAAGGACCTGTTTGCCGCCGCTAGATTCCCTG |
| | AGTGTCCTGAGGGCAGCAGCATCTCTGCCCCTAGCCAGACATCTGTG |
| | GACGTGTCCCTGATCCAGGACGTGGAAAGAATCCTGGACTACAGCCT |
| | GTGCCAAGAGACATGGTCCAAGATCAGAGCCGGCCTGCCTATCAGCC |
| | CTGTGGACCTGTCTTATCTGGCCCCTAAGAACCCTGGCACCGGACCT |
| | GCCTTCACCATCATCAATGGCACCCTGAAGTACTTTGAGACACGGTAC |
| | ATCCGCGTGGACATTGCCGCTCCTATCCTGAGCAGAATGGTCGGAAT |
| | GATCAGCGGCACCACCACCGAGAGGGAACTGTGGGATGATTGGGCC |
| | CCTTACGAGGATGTGGAAATCGGCCCTAACGGCGTGCTGAGAACAAG |
| | CAGCGGCTACAAGTTCCCACTGTATATGATCGGCCACGGCATGCTGG |
| | ACTCCGACCTGCACCTTAGCTCTAAGGCCCAGGTGTTCGAGCACCCT |
| | CACATTCAGGATGCCGCCAGCCAGCTGCCTGATGACGAGAGCCTGTT |
| | CTTTGGCGATACCGGCCTGAGCAAGAACCCCATCGAACTGGTGGAAG |
| | GCTGGTTCAGCAGCTGGAAGTCCTCTATCGCCAGCTTCTTCTTCATCA |
| | TCGGGCTGATTATCGGCCTGTTCCTGGTGCTGAGAGTGGGCATCCAC |
| | CTGTGCATCAAGCTGAAGCACACCAAGAAGCGGCAAATCTACACCGA |
| | CATCGAGATGAACCGGCTGGGCAAGTGA |
| SEQ ID NO: | MKCLLYLAFLFIGVNCKFTIVFPHNQKGNWKNVPSNYHYCPSSSDLNWH |
| 2025 | NDLIGTALQVKMPKSHKAIQADGWMCHASKWVTTCDFRWYGPKYITHSI |
| Vessiculo | RSFTPSVEQCKESIEQTKQGTWLNPGFPPQSCGYATVTDAEAVIVQVTP |
| stomatis | HHVLVDEYTGEWVDSQFINGKCSNYICPTVHNSTTWHSDYKVKGLCDSN |
| virus VSV G | LISMDITFFSEDGELSSLGKEGTGFRSNYFAYETGGKACKMQYCKHWGV |
| gene (amino | RLPSGVWFEMADKDLFAAARFPECPEGSSISAPSQTSVDVSLIQDVERIL |
| acid) | DYSLCQETWSKIRAGLPISPVDLSYLAPKNPGTGPAFTIINGTLKYFETRYI |
| | RVDIAAPILSRMVGMISGTTTERELWDDWAPYEDVEIGPNGVLRTSSGYK |
| | FPLYMIGHGMLDSDLHLSSKAQVFEHPHIQDAASQLPDDESLFFGDTGLS |
| | KNPIELVEGWFSSWKSSIASFFFIIGLIIGLFLVLRVGIHLCIKLKHTKKRQIYT |
| | DIEMNRLGK. |
| SEQ ID NO: | ATGAACTTCCTGCTGCTGACCTTCATCGTGCTGCCCCTGTGTAGCCAC |
| 2026 | GCCAAGTTCAGCATCGTGTTCCCTCAGAGCCAGAAAGGCAACTGGAA |
| Cocal virus | GAACGTGCCCAGCAGCTACCACTACTGCCCCAGCAGCAGCGACCAGA |
| COCV G | ACTGGCACAATGACCTGCTGGGAATCACCATGAAAGTGAAGATGCCC |
| gene | AAGACACACAAGGCCATCCAGGCCGATGGCTGGATGTGTCATGCCGC |
| (nucleic | CAAGTGGATCACCACCTGTGACTTCCGTTGGTACGGCCCCAAGTACAT |
| acid) | CACCCACAGCATCCACTCCATCCAGCCTACCAGCGAGCAGTGCAAAG |
| | AGAGCATCAAGCAGACCAAGCAAGGCACCTGGATGAGCCCTGGATTC |
| | CCACCTCAGAATTGCGGCTACGCCACCGTGACAGATTCTGTGGCTGT |
| | GGTGGTGCAGGCCACACCTCATCATGTGCTGGTGGATGAGTACACCG |
| | GCGAGTGGATCGACTCTCAGTTCCCCAACGGCAAGTGCGAGACAGAG |
| | GAATGCGAAACCGTGCACAACAGCACCGTGTGGTACAGCGACTACAA |
| | AGTGACCGGCCTGTGCGACGCCACACTGGTGGATACCGAGATCACCT |
| | TCTTCAGCGAGGACGGCAAGAAAGAGTCCATCGGCAAGCCCAACACC |
| | GGCTACAGAAGCAACTACTTCGCCTACGAGAAGGGCGACAAAGTGTG |
| | CAAGATGAACTACTGCAAGCACGCTGGCGTGCGGCTGCCTTCTGGTG |
| | TTTGGTTCGAGTTCGTGGACCAGGACGTGTACGCCGCTGCCAAGTTG |
| | CCTGAATGTCCTGTGGGCGCCACAATCAGCGCCCCTACACAGACATC |
| | CGTCGACGTGTCCCTGATCCTGGACGTGGAAAGAATCCTGGACTACA |
| | GCCTGTGCCAAGAGACATGGTCCAAGATCCGGTCCAAGCAGCCCGTG |
| | TCTCCTGTGGACCTGTCTTATCTGGCCCCTAAGAACCCAGGCACAGG |
| | CCCTGCCTTCACCATCATCAATGGCACCCTGAAGTACTTTGAGACACG |
| | GTACATCCGGATCGACATCGACAACCCCATCATCAGCAAGATGGTCG |
| | GAAAGATCAGCGGCAGCCAGACCGAGAGGGAACTGTGGACAGAGTG |
| | GTTCCCTTACGAAGGCGTGGAAATCGGCCCCAACGGAATCCTGAAAA |
| | CCCCTACAGGCTACAAGTTCCCGCTGTTCATGATCGGCCACGGCATG |
| | CTGGATAGCGACCTGCACAAAACAAGCCAGGCCGAGGTGTTCGAGCA |
| | CCCTCATTTGGCCGAGGCTCCTAAGCAGCTGCCCGAGGAAGAGACAC |
| | TGTTCTTCGGCGATACCGGCATCTCCAAGAATCCCGTGGAACTGATCG |
| | AAGGCTGGTTCAGCTCCTGGAAGTCTACCGTCGTGACCTTCTTCTTCG |
| | CCATCGGCGTGTTCATCCTGCTGTACGTGGTGGCCAGAATCGTGATC |
| | GCCGTGCGGTATAGATACCAGGGCAGCAACAACAAGCGGATCTACAA |
| | CGACATCGAGATGAGCCGGTTCCGGAAG |
| SEQ ID NO: | MNFLLLTFIVLPLCSHAKFSIVFPQSQKGNWKNVPSSYHYCPSSSDQNWH |
| 2027 | NDLLGITMKVKMPKTHKAIQADGWMCHAAKWITTCDFRWYGPKYITHSIH |
| Cocal virus | SIQPTSEQCKESIKQTKQGTWMSPGFPPQNCGYATVTDSVAVVVQATPH |
| COCV G | HVLVDEYTGEWIDSQFPNGKCETEECETVHNSTVWYSDYKVTGLCDATL |
| gene (amino | VDTEITFFSEDGKKESIGKPNTGYRSNYFAYEKGDKVCKMNYCKHAGVRL |
| acid) | PSGVWFEFVDQDVYAAAKLPECPVGATISAPTQTSVDVSLILDVERILDYS |
| | LCQETWSKIRSKQPVSPVDLSYLAPKNPGTGPAFTIINGTLKYFETRYIRIDI |
| | DNPIISKMVGKISGSQTERELWTEWFPYEGVEIGPNGILKTPTGYKFPLFM |
| | IGHGMLDSDLHKTSQAEVFEHPHLAEAPKQLPEEETLFFGDTGISKNPVE |
| | LIEGWFSSWKSTVVTFFFAIGVFILLYVVARIVIAVRYRYQGSNNKRIYNDIE |
| | MSRFRK |
| SEQ ID NO: | ATGAAGAAAACCACCAGGCGGAGCAGCAGCGAGACAATGATCCTGCT |
| 2028 | GATCCATCTGCCTGTGATCCTGACCACACTGACCAAGCTGATCTCCGG |
| Ekpoma | CGACCTGATCAACTTCCCCTTCCACTGCACCAACCTGGAAAACATCAA |
| virus 1 | GTACAGCAACCTGAGCTGCCCCACCGTGTGGGAGACATTCAAGATCA |
| EKV1 G | AGACCGGCGACAAGGTGGAACGGGGCAGCATGTGTAGACCTAGCCT |
| gene | GCACACCCACGACCTGGAAGAGGGCTACCTGTGCTACAAGGACACCT |
| (nucleic | GGACCACCACCTGTGACGAGAGCTGGTACTTCAGCACCGAAGTGAAG |
| acid) | TACAAGATCATCCACGAGGAAGTGCACGACATCGACTGCCTGGATGC |
| | CCTGATCGAGTACAAAGTGGGCAAGCTGAAGGCCCCTTTCTTCCCCG |
| | TGGCCACATGTTACTGGGCCAGCAGCACCACCGAGAGCATCACCTTC |
| | ATGATGATCAAGCCCCACAACGCCCCTCTGGACCCCTACAGCAATAG |
| | AATCGTGGACCCCATCATCCAGGCCGACAGCGGCGACAACCTGAAAA |
| | TCTACCGGACCACCTTTCCTAAGACACGGTGGATCAGAGAAGTGAACA |
| | CCACACTGGAAGAACGGTGCAACGTGGCCACCTGGGAGTGCCACGAT |
| | ATGACACTGTACAGCGGCTGGCTGACACACCCTAGCGGCGCCTTTAA |
| | GACCAGCCTGAGAACAGGACTGGTGGTGGACAGCCAGATCATGGGC |
| | CACATTCTGCTGCGGGATACCTGCAAGATGGACTTCTGTGGCAGACG |
| | GGGCTTCAGATTCCCTGATGGTGGATGGTGGCGGCTGACCACAGAGA |
| | ATGAAGTGTCCCTGCAGGACTTCGAGCTGAACGACACCGTGGTGCCC |
| | AAGTGCGACGACAGATCCAGAAACCACGTGGGCTACACCGACCTGGA |
| | CTACAACCCTGAGAAGATCGCCCTGGAACAGAAGTCTCTGCTCAAGA |
| | CCACCATGTGCAGAGAGAAGCTGGCCGAACTCGGCCAAGGCAAGGG |
| | CATGAGCCTGTACGACACCACCTATCTGATCCCCAACGCTCCCGGAA |
| | GATACCCCGCCTACTACATCTATCCCGTGGGCCTGAACAAGACCCTG |
| | GAAACCCAGATCCTGAAAGAGAAAACCATCAGCAACCCTCTGACCGC |
| | CAAGCGGAAAGAACACATGCCCATCATGCTGTACATGGCCCAGTGCC |
| | ACTACACCCTGATTGAGTTCCCCAATCTGGACAGCACCGGCACACTG |
| | CGGTACACCAGTCTGGAAGATCCTGTGGGCACAATCCTGGAAAGCGG |
| | CAAGAATGTGTCCCTGGCCGATCTGGGCTTCGAGGACATCAATCTGG |
| | ATAACACCACATGCAAGGGCAACGACTCCGACTGCTTCAACACCACCA |
| | CACCTAAAGAGCCCCTGCTGGACAGAAAGTTCAACATGACCAACCACA |
| | CACTGCCCTGGCGGCGGTACAGCAAGAGAGAACTGCACCACAGAGT |
| | GACCTACAACGGCATCACACACTCCCCAGTCGGACACTGGGTGCAGA |
| | TTCCTTATGGCGCCAGCCTGACAGCCAACCTGCCTGAGCACCTGATT |
| | GAAAAGCACAGCACCCACTTTTTCGACCACGTGACCAAGCAGAGCAT |
| | CTTCGAGAGAGAGCTGCAGAACGGCGAGATCAGCATCGACGATCTGG |
| | AACAGCTGATCGGCAGAAAGACCAATCACACCGATCTGCCCAAGAAA |
| | GTGCGGAACTGGGTCCAGAACGCCAAAGAAAGCGTCGTGGGCATCTT |
| | TAGAGAGTTCGGACACACCATCCGGCTGGGCCTGAGCATCGTGTCTT |
| | TTCTGATCGGCCTGATCATCAGCTTCAAAGTGTGGAAGAAGTGCCGGA |
| | AGAACAAGAAAGAGACACAGCAGCAGAGCAGAAGCAGCCCCATCTAC |
| | AGACCCCAGAACATCTATGAGCTGGAAGAAGGCCCTATCAGCCCTCC |
| | ACCTCTGGCTAGACAGAGAGAGCACGACAACAGCAACATCTTCCGCA |
| | AGACCGATCCTCGGAACCCCTTCTACAGCAGA |
| SEQ ID NO: | MKKTTRRSSSETMILLIHLPVILTTLTKLISGDLINFPFHCTNLENIKYSNLSC |
| 2029 | PTVWETFKIKTGDKVERGSMCRPSLHTHDLEEGYLCYKDTWTTTCDESW |
| Ekpoma | YFSTEVKYKIIHEEVHDIDCLDALIEYKVGKLKAPFFPVATCYWASSTTESIT |
| virus 1 | FMMIKPHNAPLDPYSNRIVDPIIQADSGDNLKIYRTTFPKTRWIREVNTTLE |
| EKV1 G | ERCNVATWECHDMTLYSGWLTHPSGAFKTSLRTGLVVDSQIMGHILLRD |
| gene (amino | TCKMDFCGRRGFRFPDGGWWRLTTENEVSLQDFELNDTVVPKCDDRSR |
| acid) | NHVGYTDLDYNPEKIALEQKSLLKTTMCREKLAELGQGKGMSLYDTTYLI |
| | PNAPGRYPAYYIYPVGLNKTLETQILKEKTISNPLTAKRKEHMPIMLYMAQ |
| | CHYTLIEFPNLDSTGTLRYTSLEDPVGTILESGKNVSLADLGFEDINLDNTT |
| | CKGNDSDCFNTTTPKEPLLDRKFNMTNHTLPWRRYSKRELHHRVTYNGI |
| | THSPVGHWVQIPYGASLTANLPEHLIEKHSTHFFDHVTKQSIFERELQNG |
| | EISIDDLEQLIGRKTNHTDLPKKVRNWVQNAKESVVGIFREFGHTIRLGLSI |
| | VSFLIGLIISFKVWKKCRKNKKETQQQSRSSPIYRPQNIYELEEGPISPPPL |
| | ARQREHDNSNIFRKTDPRNPFYSR |
| SEQ ID NO: | ATGCAGACCATGAAGAAAACCCATCTGCTGGCCTTCACCATCTTCGGC |
| 2030 | CAGATCCTGCTGGCTAGCAGCCTGGTGGTTAACCTGCCTCTGAGATG |
| Ekpoma | CAACGGCCGGAAGGACCTGCTGGTCAACAGCCTGAAATGCCCTCTGC |
| virus 2 | CTAGCACCGAAGTGAAGGTGGACGGCAAAGTGAAAGTGTACGAGGGC |
| EKV2 G | GACATCTGCAGACCCCAGATCAACGCCAAGGATGTGGAAGCCGGCTA |
| gene | CCTGTGCCACAAGGACATCTACAAGGCCATCTGCGACGAGACATGGT |
| (nucleic | ACTTCAGCGCCACCGTGAAGCACGAGATTGAGCACGCCCCTATCAGC |
| acid) | GACATCGAGTGCATCGAGGGACTGACCGAGCTGAAGCTGGGCATCGT |
| | GCCCAATCCTCAGTTCCCTAGCGTGGACTGCTACTGGAACGCCCGGA |
| | CCGAGGAAAAGCGGACCTACATCATCCTGACACAGCACGACCCTGCT |
| | CTGGACCCCTACAGCAACAAGATCAAGGACAACGTGGTGGACCCCGA |
| | CTGCGACTTCAACCTGTGCAAGACCAACTTCATCAACACCAAGTGGAT |
| | CAGGGACAAGAACACCACCGAGATCGAGAGATGCGACGCCAAGAACT |
| | GGGACTGTCACCCCTACAAAATCTACCAAGGCTGGATCAGCAAGAGC |
| | GAGATGATCGGCTGGGGCGACCCTACACAGAGCTACAGCTATACAGG |
| | CCTGGTGCTGGACAGCCACATCTACGGACACATCCCCATGAGCAAGC |
| | TGTGTCACAAGACCTTTTGCGGCAAAGAGGGCTATCTGTTCCCCGACA |
| | AGAGCTGGTGGCAGATCAGAAGCAAGACCCCTGCCTCTCCACTGTTC |
| | AGAGAGCTGACCCTGAACGGCAGCAGAAGCGCCTTTCCTGACTGCGA |
| | GACAATCAAGACCTACGGCTACGCCGAGGTGGAAGAGGATGAGAGCA |
| | GCGAGATCATCAGAGAGAGCGCCGAGATCCGGCACGAGATGTGTCTG |
| | GAAACCCTGAGCACACTGGCCAGCGGCTACGAGGCCTCTTTCAGGGA |
| | CCTCATGAAGTTCATCCCTCAGAGGCCCGGACCTGGCAAGGCCTACT |
| | CTCTGAATAGCAATGGCAAGCCCAGCTACTACAACTACCACTGGGCC |
| | GGACATCCTGCCAGCAGCGCCTCTATTCAAGAGCAGGATTGCTACTA |
| | CTACCTGGTGGACATCCCCAAGATCCAGGACGACGGCATCCTGAACA |
| | TCACCGGCATCGGCAACACCGACGTGTGTGGCAAGCTGCTCGTGAAC |
| | GGCTCTAGCATGACACTGAACAGCCTGGGCTTCAAGATCGACCACCA |
| | CTACGACGACCACATCGTGGAAACCGGCACCGATGTGCACGACGAGA |
| | TGAACATCAAAGAACGGATGGTCTGGATCAAGCCGGACAAGATTCAC |
| | CCTCTGCTGTGGGTCGGACCCAACGGCATCGTGATTGACCACCAGCA |
| | CAAGCAGATTCACTTCCCCGTGTTCAGCAGAGGCGTGGACAGAATCC |
| | CTCACTACTGGACCCAGAAACACCGGGTCGTGAAGTACAGACACGCC |
| | ACACAGCTGAAAATCTACAAGCAGTACCTGGACAACCCCGAGAAGTCT |
| | AACCCCTACGACTTCAATGCCTGGACCGGCAGACACGTGAACCGGAC |
| | AGAAATCCCAGTGGCCATCAGCAACTGGTTCAGCGGCGTGAAGGACA |
| | CCGTGTTCGACAAGATTAGCAAGATCGGCAGCTGGCTGAAGTGGTCC |
| | TTCTACCTGTGTTTCATCTTCGTGCTGTTCAAAGGCGGCCTGCTCGTG |
| | TGGAACAAGTACAAGACCCTGCGGCACCAGACCAAGAGAACCCCAAA |
| | GGGCAAGAACTCTCAGGACCCTGAGAAGCTGGACATCTTTGGACAGA |
| | CCGTG |
| SEQ ID NO: | MQTMKKTHLLAFTIFGQILLASSLVVNLPLRCNGRKDLLVNSLKCPLPSTE |
| 2031 | VKVDGKVKVYEGDICRPQINAKDVEAGYLCHKDIYKAICDETWYFSATVK |
| Ekpoma | HEIEHAPISDIECIEGLTELKLGIVPNPQFPSVDCYWNARTEEKRTYIILTQH |
| virus 2 | DPALDPYSNKIKDNVVDPDCDFNLCKTNFINTKWIRDKNTTEIERCDAKN |
| EKV2 G | WDCHPYKIYQGWISKSEMIGWGDPTQSYSYTGLVLDSHIYGHIPMSKLCH |
| gene (amino | KTFCGKEGYLFPDKSWWQIRSKTPASPLFRELTLNGSRSAFPDCETIKTY |
| acid) | GYAEVEEDESSEIIRESAEIRHEMCLETLSTLASGYEASFRDLMKFIPQRP |
| | GPGKAYSLNSNGKPSYYNYHWAGHPASSASIQEQDCYYYLVDIPKIQDD |
| | GILNITGIGNTDVCGKLLVNGSSMTLNSLGFKIDHHYDDHIVETGTDVHDE |
| | MNIKERMVWIKPDKIHPLLWVGPNGIVIDHQHKQIHFPVFSRGVDRIPHYW |
| | TQKHRVVKYRHATQLKIYKQYLDNPEKSNPYDFNAWTGRHVNRTEIPVAI |
| | SNWFSGVKDTVFDKISKIGSWLKWSFYLCFIFVLFKGGLLVWNKYKTLRH |
| | QTKRTPKGKNSQDPEKLDIFGQTV |
| SEQ ID NO: | TACCAAGTGCGCAACTCCACAGGGCTTTATCATGTCACCAATGATTGC |
| 2032 | CCTAACTCGAGTATTGTGTACGAGGCGCACGATGCCATCCTGCATACT |
| Hepatitis C | CCGGGGTGTGTCCCTTGCGTTCGCGAGGGCAACGTCTCGAGGTGTTG |
| virus HCV | GGTGGCGATGACCCCCACGGTAGCCACCAGGGACGGCAAACTCCCC |
| E1-E2 gene, | GCGACGCAGCTTCGACGTCACATCGATCTGCTTGTCGGGAGCGCCAC |
| HC-J1 strain | CCTCTGTTCGGCCCTCTACGTGGGGGATCTGTGCGGGTCCGTCTTCC |
| (nucleic | TTATTGGTCAACTGTTTACCTTCTCTCCCAGGCGCCACTGGACAACGC |
| acid) | AAGGCTGCAATTGTTCTATCTACCCCGGCCATATAACGGGTCATCGCA |
| | TGGCATGGGATATGATGATGAACTGGTCCCCTACGGCGGCGTTGGTA |
| | ATGGCTCAGCTGCTCCGGATCCCACAAGCCATCTTGGATATGATCGCT |
| | GGTGCTCACTGGGGAGTCCTGGCGGGCATAGCGTATTTCTCCATGGT |
| | GGGGAACTGGGCGAAGGTCCTGGTAGTGCTGTTGCTGTTTGCCGGC |
| | GTCGACGCGGAAACCATCGTCTCCGGGGGACAAGCCGCCCGCGCCA |
| | TGTCTGGACTTGTTAGTCTCTTCACACCAGGCGCTAAGCAGAACATCC |
| | AGCTGATCAACACCAACGGCAGTTGGCACATCAATAGCACGGCCTTG |
| | AACTGCAATGAAAGCCTTAACACCGGCTGGTTAGCAGGGCTTATCTAT |
| | CAACACAAATTCAACTCTTCGGGCTGTCCCGAGAGGTTGGCCAGCTG |
| | CCGACGCCTTACCGATTTTGACCAGGGCTGGGGCCCTATCAGTCATG |
| | CCAACGGAAGCGGCCCCGACCAACGCCCCTATTGTTGGCACTACCCC |
| | CCAAAACCTTGCGGTATCGTGCCCGCAAAGAGCGTATGTGGCCCGGT |
| | ATATTGCTTCACTCCCAGCCCCGTGGTGGTGGGAACGACCGACAGGT |
| | CGGGCGCGCCTACCTACAACTGGGGTGCAAATGACACGGACGTCTTC |
| | GTCCTCAACAACACCAGGCCACCGCTGGGCAATTGGTTCGGTTGCAC |
| | CTGGATGAACTCAACTGGATTCACCAAGGTATGCGGAGCGCCTCCTT |
| | GTGTGATTGGAGGGGGGGGCAACAACACCCTGCACTGCCCCACTGAT |
| | TGTTTCCGCAAGCATCCGGAAGCCACATACTCTCGGTGCGGCTCTGG |
| | TCCCTGGATCACACCCAGATGCCTGGTCGACTATCCATATAGGCTTTG |
| | GCATTACCCTTGTACCATCAACTATACCATTTTTAAAGTTAGGATGTAC |
| | GTGGGAGGGGTCGAGCACAGGCTGGATGCTGCCTGCAACTGGACGC |
| | GGGGCGAACGTTGCGATCTGGAAGATAGGGACAGGTCCGAGCTCAG |
| | CCCGTTGCTGCTGTCCACCACGCAGTGGCAGGTCCTTCCGTGTTCAT |
| | TCACGACCCTGCCAGCCTTGTCCACCGGCCTCATCCACCTCCACCAG |
| | AACATTGTGGACGTGCAGTACCTGTACGGGGTGGGGTCAAGCATCGC |
| | GTCCTGGGCCATCAAGTGGGAGTACGTCGTTCTCCTGTTCCTTCTGCT |
| | TGCAGACGCGCGCGTCTGCTCCTGCTTGTGGATGATGCTACTCATATC |
| | CCAGGCGGAGGCG |
| SEQ ID NO: | YQVRNSTGLYHVTNDCPNSSIVYEAHDAILHTPGCVPCVREGNVSRCWV |
| 2033 | AMTPTVATRDGKLPATQLRRHIDLLVGSATLCSALYVGDLCGSVFLIGQLF |
| Hepatitis C | TFSPRRHWTTQGCNCSIYPGHITGHRMAWDMMMNWSPTAALVMAQLLR |
| virus HCV | IPQAILDMIAGAHWGVLAGIAYFSMVGNWAKVLVVLLLFAGVDAETIVSGG |
| E1-E2, HC- | QAARAMSGLVSLFTPGAKQNIQLINTNGSWHINSTALNCNESLNTGWLAG |
| J1 strain | LIYQHKFNSSGCPERLASCRRLTDFDQGWGPISHANGSGPDQRPYCWH |
| (amino acid) | YPPKPCGIVPAKSVCGPVYCFTPSPVVVGTTDRSGAPTYNWGANDTDVF |
| | VLNNTRPPLGNWFGCTWMNSTGFTKVCGAPPCVIGGGGNNTLHCPTDC |
| | FRKHPEATYSRCGSGPWITPRCLVDYPYRLWHYPCTINYTIFKVRMYVGG |
| | VEHRLDAACNWTRGERCDLEDRDRSELSPLLLSTTQWQVLPCSFTTLPA |
| | LSTGLIHLHQNIVDVQYLYGVGSSIASWAIKWEYVVLLFLLLADARVCSCL |
| | WMMLLISQAEA |
| SEQ ID NO: | ATGGGCCCTCCTTCTTCTGCCGCTGCTTGTAGCAGAGGCAGCCCCAG |
| 2034 | AATCCTGAGAGTTAGAGCCGGCGGAATCAGCTTCTTCTACACCATCAT |
| Human | GGCCGTCCTGCTGCTGCTCCTGGTTGTTGAAGCTGGCGCTATTCTGG |
| pegivirus 1 | CCCCTGCCACACATGCCTGTAGAGCCAATGGCCAGTACTTCCTGACC |
| HPGV1 G | AACTGCTGTGCCCCTGAGGACATCGGCTTTTGTCTGGAAGGCGGATG |
| gene | TCTGGTGGCCCTGGGCTGTACCATCTGCACCGATCAATGCTGGCCTC |
| (nucleic | TGTACCAGGCTGGCCTGGCTGTTAGACCTGGAAAGTCTGCCGCTCAG |
| acid) | CTCGTGGGAGAACTGGGCTCTCTGTATGGCCCTCTGAGCGTGTCAGC |
| | CTATGTGGCCGGAATCCTCGGCCTGGGCGAAGTGTATTCTGGCGTGC |
| | TGACAGTGGGCGTCGCCCTGACTAGAAGAGTGTACCCCGTGCCTAAT |
| | CTGACCTGTGCCGTGGCCTGTGAACTGAAGTGGGAGAGCGAGTTTTG |
| | GCGGTGGACAGAACAGCTGGCCTCCAACTACTGGATTCTGGAATACC |
| | TGTGGAAGGTGCCCTTCGACTTTTGGAGAGGCGTGATCAGCCTGACA |
| | CCTCTGCTCGTGTGTGTGGCTGCCCTGCTGCTTCTGGAACAGCGGAT |
| | CGTGATGGTGTTCCTGCTGGTCACAATGGCCGGCATGTCTCAAGGCG |
| | CTCCAGCCTCTGTTCTGGGCAGCAGACCTTTCGATTACGGCCTGACCT |
| | GGCAGACCTGTAGCTGCAGAGCTAACGGCAGCAGATTCAGCACCGGC |
| | GAGAAAGTGTGGGACAGAGGCAATGTGACCCTGCAGTGCGACTGCCC |
| | TAATGGCCCTTGGGTTTGGCTGCCTGCCTTCTGTCAGGCTATCGGCT |
| | GGGGCGACCCTATCACCTATTGGAGCCACGGCCAGAACCAGTGGCCT |
| | CTCAGCTGTCCTCAGTACGTGTACGGCAGCGCCACAGTGACTTGTGT |
| | GTGGGGAAGCGCCAGTTGGTTCGCCAGCACAAGCGGCAGAGACAGC |
| | AAGATCGATGTGTGGTCCCTGGTGCCTGTGGGCTCTGCCACATGTAC |
| | TATTGCCGCTCTGGGCTCCAGCGACAGAGATACAGTTCCTGGCCTGA |
| | GCGAGTGGGGCATCCCTTGTGTGACATGCGTGCTGGATAGAAGGCCT |
| | GCCAGCTGTGGAACCTGTGTGCGAGATTGCTGGCCAGAGACAGGCA |
| | GCGTGCGGTTCCCATTTCACAGATGTGGCGTGGGCCCCAGACTGACC |
| | AAGGATCTGGAAGCCGTGCCTTTCGTGAACCGGACCACACCATTCAC |
| | CATCAGAGGCCCTCTGGGCAATCAAGGCAGAGGGAATCCTGTGCGGA |
| | GCCCTCTCGGCTTTGGCAGCTATGCCATGACCAGAATCCGGGACACA |
| | CTGCACCTGGTGGAATGCCCTACACCAGCCATCGAACCTCCAACCGG |
| | CACCTTCGGCTTTTTCCCTGGAACACCTCCTCTGAACAACTGCATGCT |
| | GCTGGGCACCGAAGTGTCTGAAGCTCTTGGCGGAGCTGGACTGACC |
| | GGCGGCTTTTATGAGCCTCTCGTGCGGAGATGCAGCAAGCTGATGGG |
| | AAGCAGAAACCCTGTGTGCCCTGGCTTTGCTTGGCTGAGTTCCGGCA |
| | GACCCGATGGCTTTATCCACGTGCAGGGCCATCTGCAAGAAGTGGAC |
| | GCCGGCAACTTCATCCCTCCACCTAGATGGCTGCTGCTGGACTTCGT |
| | GTTCGTGCTGCTGTACCTGATGAAGCTCGCCGAGGCTAGACTGGTGC |
| | CTCTGATTCTGCTTCTGCTGTGGTGGTGGGTCAACCAGTTGGCTGTGC |
| | TTGGACTGCCTGCAGTGGAAGCTGCTGTGGCCGGCGAAGTTTTTGCT |
| | GGCCCTGCTCTGTCTTGGTGCCTGGGCCTTCCTGTGGTGTCTATGATT |
| | CTGGGCCTCGCCAACCTGGTGCTGTACTTCAGATGGCTGGGCCCTCA |
| | GCGGCTGATGTTTCTGGTCCTGTGGAAACTGGCCAGGGGCGCCTTTC |
| | CTCTGGCTCTGCTC |
| SEQ ID NO: | MGPPSSAAACSRGSPRILRVRAGGISFFYTIMAVLLLLLVVEAGAILAPATH |
| 2035 | ACRANGQYFLTNCCAPEDIGFCLEGGCLVALGCTICTDQCWPLYQAGLA |
| Human | VRPGKSAAQLVGELGSLYGPLSVSAYVAGILGLGEVYSGVLTVGVALTRR |
| pegivirus 1 | VYPVPNLTCAVACELKWESEFWRWTEQLASNYWILEYLWKVPFDFWRG |
| HPGV1 G | VISLTPLLVCVAALLLLEQRIVMVFLLVTMAGMSQGAPASVLGSRPFDYGL |
| gene (amino | TWQTCSCRANGSRFSTGEKVWDRGNVTLQCDCPNGPWVWLPAFCQAI |
| acid) | GWGDPITYWSHGQNQWPLSCPQYVYGSATVTCVWGSASWFASTSGRD |
| | SKIDVWSLVPVGSATCTIAALGSSDRDTVPGLSEWGIPCVTCVLDRRPAS |
| | CGTCVRDCWPETGSVRFPFHRCGVGPRLTKDLEAVPFVNRTTPFTIRGP |
| | LGNQGRGNPVRSPLGFGSYAMTRIRDTLHLVECPTPAIEPPTGTFGFFPG |
| | TPPLNNCMLLGTEVSEALGGAGLTGGFYEPLVRRCSKLMGSRNPVCPGF |
| | AWLSSGRPDGFIHVQGHLQEVDAGNFIPPPRWLLLDFVFVLLYLMKLAEA |
| | RLVPLILLLLWWWVNQLAVLGLPAVEAAVAGEVFAGPALSWCLGLPWS |
| | MILGLANLVLYFRWLGPQRLMFLVLWKLARGAFPLALL |
| SEQ ID NO: | ATGGGCTGTAGCACCGACCAGACCATCTGTAGCCCTGTTGTGGGCGC |
| 2036 | CGACTACAATACCAGCTCTGGCTGCAGAGCCCTGAACGGCTCTGATC |
| Human | ACTGTGGCGGCAGCAGCTGTAGAAGCCCTAGTAGAGTGCAGGCCGCT |
| pegivirus 2 | CGGAGAGTTCTGCAGCTGTGTGCTTTTCTGGCCCTGATCGGCAGCGG |
| HPGV2 G | CATGTGCAGCATCAGAAGCAAGACCGAGGGCAGAATCGAGAGCGGC |
| gene | CAGATCCTGCAGTCTCAGAGAGCTTGTTGGACCGGCGAGGGCTTCGC |
| (nucleic | CTTCTTCAGCAACTGCTGCAACCAGAGCGACATCATGTGGTGCCTGCA |
| acid) | CCGTTGGTGCGTGACCAGACCTGGATGTCTCGTGTGCACCGGCAACG |
| | CCACACATCCTGTGTGCTGGGATTATCTCGGAAGCGGCGTGTCCAGA |
| | AGGCCTGCCAGAAGGCTTGGAGAAGGCGCCGAAATGCTGCTGCGGC |
| | TGATTGGAATTGCCGGCTGGCTGGGACTGCTGGCTGAAGCTCTTGGC |
| | ATGAGCGAGATGTACGCCGCCATCCTGTGCTTCGGCTTTATCGCTTG |
| | GTACGGCTGGGGCATCCCCAAGACACTCGTGTGTACTGTGTGCCCTG |
| | CCGTGAATATCAGCCCCTACAGCTTTCTGAGCCCCGACACAATCGCCT |
| | TCGGCACCTGGATTCTGCAACTGCCTGGACTGCTGTGGCAGATGTTC |
| | GTGAACTTCCCCATCCTGTACTCCACATGGATTCTGTGGCTGCTGCTG |
| | AGCGGCAAGACAGTGGCCGTGATTGCCATCCTGCTGGCCTCTCCAAC |
| | AGTGATGGCCTACAAGCACCCCAGCGAGAGCTACCTGAAGTACTGCA |
| | CCATCACCAATGCCAGCGCCGCCATGAACTGCGATTGCCCTTTTGGC |
| | ACCTTCACCAGAAACACCGAGAGCCGGTTCAGCATCCCCAGGTTCTG |
| | CCCTGTGAAGATCGAGAGCAGCACCTTCATCTGCTCTTGGGGCAGCT |
| | GGTGGTGGTTCGCCGAGAACATCACCAGACCTTACAGCGACGTGGGC |
| | ATGCCTCCTGCTCCTATTAGCGCCCTGTGCTACATCTACAGCAACAAC |
| | GACCCTCCTCCTTGGTACTACAACACCACCATCATTCCCCAGAACTGC |
| | CGGAACAGCACAGTGGACCCTACAACAGCCCCTTGCAGAGATAAGTG |
| | GGGCAATGCCACCGCCTGCATCCTGGACAGAAGAAGCAGATTCTGCG |
| | GCGACTGCTACGGCGGCTGCTTCTACACAAATGGCAGCCACGACCGC |
| | AGCTGGGACAGATGTGGCATCGGCTATAGAGATGGCCTGATCGAGTT |
| | TGTGCAGCTCGGCCAGATTCGGCCCAACATCAGCAATACCACCATCG |
| | AGCTGCTGGCAGGCGCCTCTCTGGTTATTGCTTCTGGACTGAGGCCT |
| | GGCTACGGCTGCAGTAGAGCACATGGCGTGGTGCACTGTTACAGGTG |
| | CCCCAGCTACCGCGACCTGGAACAGTTTGGACCTGGCCTCGGAAAAT |
| | GGGTGCCACTGCCTGGCGAACCTGTGCCTGAGCTGTGCATCAATCCT |
| | CAGTGGGCTAGACGGGGCTTCAGAGTGTCCAACAATCCCCTGAGCCT |
| | GATCCAGACCTTCGTCGAGGATATTTTCCTGGCTCCTTTCTGCAACCC |
| | CACACCTGGCAGAGTCCGCGTGTGCAACAACACCGCCTTCTATCCTA |
| | GAGGCGGCGGATTCGTGCAGCTGATCGGAGATGTGCAGGTCCTGAC |
| | ACCTAACACCGCCAGCCTGCATAGCCTGCTGACACTGATCTCCCTGAT |
| | CCTGCTCGTGTGCGTGGTGTCCGGCGCTAGATTCGTGCCCCTGATCA |
| | TCATATTCTTTTGGAGCGTGCGGCACGTGTACGCCAGCTGTTACCTGT |
| | CTTGTGACTGGGCCGTGTGCAATGACGCCTTCTGCTTTACCTCTGGCA |
| | CCTGTGCCACCTTCAACGACGTGCTGTGTCTGCCTGTGGCCACCAGA |
| | ATCAGCTCTTGTGGACATGCCGTGCCTCCACCTGACAGAGGATGGGA |
| | AGTGCCTGCTGCTCTGTCTTGGGCCATCAGCAGAACCACCGGCCTGA |
| | CCTTCGACGTGTTCAGCTTCATCCAGTACCTGCCTACCGTGCCTGGCA |
| | ACAACTCCGACATCATCTACTGCGGCGAGCCCACCTTCTTCGGCGAT |
| | CTGACCGGAATCTACTGGCCCTACTTTCTGCCAGGCGTCCTGCTGCT |
| | GTACCTGACACCATTTCTGGGCCTGAGACTGATGCTGGCCGGCTTCA |
| | ACATCGACGGACTGTTCCCTATCAGACACGCCACCGCCGCTCTGAGA |
| | TTCAGCACCAGTAGAGTGACCCTGTCTGTGGTGGCCGCCTTCCTGAT |
| | CTACATCCTGTCTCACCCCGTGAACGCTGCCCTGAACAGAATGTTTCT |
| | GGCCAGCGCCAACCTGGAAATGATCCTGAGCTTCGACACCTACCACG |
| | AGACAATCCTGTATATCGTCTGCCTGATGCTCTACCTGCAAGTGTCCC |
| | CTAGAGCCGGACTGGCTGCTATGGTGGCCATCAAGCTGAGCAGAGGC |
| | CTGCTGTTTGCTGTGGTGCTGGCTCACGGTGTCTGT |
| SEQ ID NO: | MGCSTDQTICSPVVGADYNTSSGCRALNGSDHCGGSSCRSPSRVQAAR |
| 2037 | RVLQLCAFLALIGSGMCSIRSKTEGRIESGQILQSQRACWTGEGFAFFSN |
| Human | CCNQSDIMWCLHRWCVTRPGCLVCTGNATHPVCWDYLGSGVSRRPAR |
| pegivirus 2 | RLGEGAEMLLRLIGIAGWLGLLAEALGMSEMYAAILCFGFIAWYGWGIPKT |
| HPGV2 G | LVCTVCPAVNISPYSFLSPDTIAFGTWILQLPGLLWQMFVNFPILYSTWILW |
| gene (amino | LLLSGKTVAVIAILLASPTVMAYKHPSESYLKYCTITNASAAMNCDCPFGTF |
| acid) | TRNTESRFSIPRFCPVKIESSTFICSWGSWWWFAENITRPYSDVGMPPAP |
| | ISALCYIYSNNDPPPWYYNTTIIPQNCRNSTVDPTTAPCRDKWGNATACIL |
| | DRRSRFCGDCYGGCFYTNGSHDRSWDRCGIGYRDGLIEFVQLGQIRPNI |
| | SNTTIELLAGASLVIASGLRPGYGCSRAHGVVHCYRCPSYRDLEQFGPGL |
| | GKWVPLPGEPVPELCINPQWARRGFRVSNNPLSLIQTFVEDIFLAPFCNP |
| | TPGRVRVCNNTAFYPRGGGFVQLIGDVQVLTPNTASLHSLLTLISLILLVCV |
| | VSGARFVPLIIIFFWSVRHVYASCYLSCDWAVCNDAFCFTSGTCATFNDV |
| | LCLPVATRISSCGHAVPPPDRGWEVPAALSWAISRTTGLTFDVFSFIQYLP |
| | TVPGNNSDIIYCGEPTFFGDLTGIYWPYFLPGVLLLYLTPFLGLRLMLAGF |
| | NIDGLFPIRHATAALRFSTSRVTLSVVAAFLIYILSHPVNAALNRMFLASANL |
| | EMILSFDTYHETILYIVCLMLYLQVSPRAGLAAMVAIKLSRGLLFAWLAHG |
| | VC |
| SEQ ID NO: | ATGGCGGAGGTCACTAGACGTGGGAGTGCATACTATATGTACTTGGA |
| 2038 | CAGAAACGATGCTGGGGAGGCCATATCTTTTCCAACCACATTGGGGAT |
| Zika virus | GAATAAGTGTTATATACAGATCATGGATCTTGGACACATGTGTGATGC |
| ZIKV G | CACCATGAGCTATGAATGCCCTATGCTGGATGAGGGGGTGGAACCAG |
| gene | ATGACGTCGATTGTTGGTGCAACACGACGTCAACTTGGGTTGTGTACG |
| (nucleic | GAACCTGCCATCACAAAAAAGGTGAAGCACGGAGATCAAGAAGAGCT |
| acid) | GTGACGCTCCCTTCCCATTCCACTAGGAAGCTGCAAACGCGGTCGCA |
| | AACCTGGTTGGAATCAAGAGAATACACAAAGCACTTGATTAGAGTCGA |
| | AAATTGGATATTCAGGAACCCTGGCTTCGCGTTAGCAGCAGCTGCTAT |
| | CGCTTGGCTTTTGGGAAGCTCAACGAGCCAAAAAGTCATATACTTGGT |
| | CATGATACTGCTGATTGCCCCGGCATACAGCATCAGGTGCATAGGAG |
| | TCAGCAATAGGGACTTTGTGGAAGGTATGTCAGGTGGGACTTGGGTT |
| | GATGTTGTCTTGGAACATGGAGGTTGTGTCACCGTAATGGCACAGGA |
| | CAAACCGACTGTCGACATAGAGCTGGTTACAACAACAGTCAGCAACAT |
| | GGCGGAGGTAAGATCCTACTGCTATGAGGCATCAATATCAGACATGG |
| | CTTCGGACAGCCGCTGCCCAACACAAGGTGAAGCCTACCTTGACAAG |
| | CAATCAGACACTCAATATGTCTGCAAAAGAACGTTAGTGGACAGAGGC |
| | TGGGGAAATGGATGTGGACTTTTTGGCAAAGGGAGCCTGGTGACATG |
| | CGCTAAGTTTGCATGCTCCAAGAAAATGACCGGGAAAAGCATCCAGC |
| | CAGAGAATCTGGAGTACCGGATAATGCTGTCAGTTCATGGCTCCCAG |
| | CACAGTGGGATGATCGTTAATGACACAGGACATGAAACTGATGAGAAT |
| | AGAGCGAAAGTTGAGATAACGCCCAATTCACCAAGAGCCGAAGCCAC |
| | CCTGGGGGGTTTTGGAAGCCTAGGACTTGATTGTGAACCGAGGACAG |
| | GCCTTGACTTTTCAGATTTGTATTACTTGACTATGAATAACAAGCACTG |
| | GTTGGTTCACAAGGAGTGGTTCCACGACATTCCATTACCTTGGCACGC |
| | TGGGGCAGACACCGGAACTCCACACTGGAACAACAAAGAAGCACTGG |
| | TAGAGTTCAAGGACGCACATGCCAAAAGGCAAACTGTCGTGGTTCTAG |
| | GGAGTCAAGAAGGAGCAGTTCACACGGCCCTTGCTGGAGCTCTGGAG |
| | GCTGAGATGGATGGAGCAAAGGGAAGGCTGTCCTCTGGCCACTTGAA |
| | ATGTCGCCTGAAAATGGATAAACTTAGATTGAAGGGCGTGTCATACTC |
| | CTTGTGTACTGCAGCGTTCACATTCACCAAGATCCCGGCTGAAACACT |
| | GCACGGGACAGTCACAGTGGAGGTACAGTACGCAGGGACAGATGGA |
| | CCTTGCAAGGTTCCAGCTCAGATGGCGGTGGACATGCAAACTCTGAC |
| | CCCAGTTGGGAGGTTGATAACCGCTAACCCCGTAATCACTGAAAGCA |
| | CTGAGAACTCTAAGATGATGCTGGAACTTGATCCACCATTTGGGGACT |
| | CTTACATTGTCATAGGAGTCGGGGAGAAGAAGATCACCCACCACTGG |
| | CACAGGAGTGGCAGCACCATTGGAAAAGCATTTGAAGCCACTGTGAG |
| | AGGTGCCAAGAGAATGGCAGTCTTGGGAGACACAGCCTGGGACTTTG |
| | GATCAGTTGGAGGCGCTCTCAACTCATTGGGCAAGGGCATCCATCAA |
| | ATTTTTGGAGCAGCTTTCAAATCATTGTTTGGAGGAATGTCCTGGTTCT |
| | CACAAATTCTCATTGGAACGTTGCTGATGTGGTTGGGTCTGAACACAA |
| | AGAATGGATCTATTTCCCTTATGTGCTTGGCCTTAGGGGGAGTGTTGA |
| | TCTTCTTATCCACAGCCGTCTCTGCTGAT |
| SEQ ID NO: | MAEVTRRGSAYYMYLDRNDAGEAISFPTTLGMNKCYIQIMDLGHMCDAT |
| 2039 | MSYECPMLDEGVEPDDVDCWCNTTSTWVVYGTCHHKKGEARRSRRAV |
| Zika virus | TLPSHSTRKLQTRSQTWLESREYTKHLIRVENWIFRNPGFALAAAAIAWLL |
| ZIKV G | GSSTSQKVIYLVMILLIAPAYSIRCIGVSNRDFVEGMSGGTWVDVVLEHGG |
| gene (amino | CVTVMAQDKPTVDIELVTTTVSNMAEVRSYCYEASISDMASDSRCPTQG |
| acid) | EAYLDKQSDTQYVCKRTLVDRGWGNGCGLFGKGSLVTCAKFACSKKMT |
| | GKSIQPENLEYRIMLSVHGSQHSGMIVNDTGHETDENRAKVEITPNSPRA |
| | EATLGGFGSLGLDCEPRTGLDFSDLYYLTMNNKHWLVHKEWFHDIPLPW |
| | HAGADTGTPHWNNKEALVEFKDAHAKRQTVVVLGSQEGAVHTALAGAL |
| | EAEMDGAKGRLSSGHLKCRLKMDKLRLKGVSYSLCTAAFTFTKIPAETLH |
| | GTVTVEVQYAGTDGPCKVPAQMAVDMQTLTPVGRLITANPVITESTENSK |
| | MMLELDPPFGDSYIVIGVGEKKITHHWHRSGSTIGKAFEATVRGAKRMAV |
| | LGDTAWDFGSVGGALNSLGKGIHQIFGAAFKSLFGGMSWFSQILIGTLLM |
| | WLGLNTKNGSISLMCLALGGVLIFLSTAVSAD |
| SEQ ID NO: | ATGAAGACAACCTGCTTCCTGATCAGCCTGATCCTGATCCAGGGCACC |
| 2040 | AAGAACCTGCCTATCCTGGAAATCGCCAGCAACAACCAGCCTCAGAA |
| Marburg | CGTGGACAGCGTGTGTAGCGGCACCCTGCAGAAAACCGAGGACGTG |
| virus MARV | CACCTGATGGGCTTTACCCTGAGCGGCCAGAAGGTGGCCGATTCTCC |
| G gene | ACTGGAAGCCAGCAAGAGATGGGCCTTCAGAACAGGCGTGCCACCTA |
| (nucleic | AGAACGTCGAGTACACCGAAGGCGAGGAAGCCAAGACCTGCTACAAC |
| acid) | ATCAGCGTGACAGACCCCAGCGGCAAGAGCCTGTTGCTCGACCCTCC |
| | TACCAACATCCGGGACTACCCCAAGTGCAAGACCATCCACCACATCCA |
| | GGGCCAGAATCCTCACGCTCAGGGAATTGCCCTGCACCTGTGGGGC |
| | GCCTTTTTCCTGTATGATCGGATCGCCTCCACCACCATGTACCGCGGC |
| | AAAGTGTTCACCGAGGGCAATATCGCCGCCATGATCGTGAACAAGAC |
| | CGTGCACAAGATGATCTTCAGCCGGCAAGGCCAGGGCTACAGACACA |
| | TGAATCTGACCAGCACCAACAAGTACTGGACCAGCAGCAACGGCACC |
| | CAGACCAATGATACCGGCTGTTTCGGAGCCCTGCAAGAGTACAACTC |
| | CACCAAGAATCAGACATGCGCCCCTAGCAAGATCCCTCCTCCTTTGCC |
| | TACTGCTCGGCCCGAGATCAAGCTGACAAGCACCCCTACCGATGCCA |
| | CCAAGCTGAACACCACCGATCCTAGCAGCGACGACGAGGATCTGGCC |
| | ACATCTGGATCTGGCTCTGGCGAGAGAGAGCCACACACCACATCTGA |
| | CGCCGTGACAAAGCAGGGCCTGAGCAGCACAATGCCACCTACACCTT |
| | CTCCACAGCCTAGCACACCTCAGCAAGGCGGCAACAACACCAACCAC |
| | TCTCAGGATGCCGTGACCGAGCTGGACAAGAACAATACCACCGCTCA |
| | GCCCAGCATGCCTCCTCACAACACCACAACCATCTCCACCAACAATAC |
| | CTCCAAGCACAACTTCAGCACACTGAGCGCCCCTCTGCAGAATACCA |
| | CCAACGACAACACCCAGAGCACCATCACCGAGAACGAGCAGACAAGC |
| | GCTCCCAGCATCACCACACTGCCTCCAACCGGCAATCCTACCACCGC |
| | CAAGAGCACCAGCTCTAAGAAGGGCCCTGCCACAACAGCCCCTAACA |
| | CCACCAATGAGCACTTCACAAGCCCACCTCCAACACCTAGCAGCACT |
| | GCCCAGCACCTGGTGTACTTCAGACGGAAGAGATCCATCCTTTGGCG |
| | CGAGGGCGATATGTTCCCCTTCCTGGACGGCCTGATCAACGCCCCTA |
| | TCGACTTCGACCCCGTGCCAAACACCAAGACAATCTTCGACGAGAGC |
| | AGCAGCAGCGGCGCTTCTGCCGAAGAAGATCAGCACGCCTCTCCAAA |
| | CATCTCTCTGACCCTGAGCTACTTCCCCAACATCAACGAGAACACCGC |
| | CTACAGCGGCGAGAATGAGAACGATTGTGACGCCGAGCTGCGGATTT |
| | GGAGCGTGCAAGAGGATGATCTGGCTGCCGGCCTGAGCTGGATTCCT |
| | TTTTTTGGCCCTGGCATCGAGGGCCTGTATACCGCCGTGCTGATTAAG |
| | AACCAGAACAACCTCGTGTGCCGGCTGCGGAGACTGGCCAATCAGAC |
| | AGCCAAGTCTCTGGAACTGCTGCTGAGAGTGACCACCGAGGAACGGA |
| | CCTTCTCTCTGATCAACCGGCACGCCATCGACTTTCTGCTGACCAGAT |
| | GGGGCGGCACATGCAAAGTGCTGGGCCCTGATTGCTGCATCGGAATC |
| | GAGGACCTGAGCAAGAACATCTCCGAGCAGATCGACCAGATCAAGAA |
| | GGACGAGCAGAAAGAAGGCACCGGCTGGGGACTTGGCGGAAAGTGG |
| | TGGACATCTGAT |
| SEQ ID NO: | MKTTCFLISLILIQGTKNLPILEIASNNQPQNVDSVCSGTLQKTEDVHLMGF |
| 2041 | TLSGQKVADSPLEASKRWAFRTGVPPKNVEYTEGEEAKTCYNISVTDPS |
| Marburg | GKSLLLDPPTNIRDYPKCKTIHHIQGQNPHAQGIALHLWGAFFLYDRIASTT |
| virus MARV | MYRGKVFTEGNIAAMIVNKTVHKMIFSRQGQGYRHMNLTSTNKYWTSSN |
| G gene | GTQTNDTGCFGALQEYNSTKNQTCAPSKIPPPLPTARPEIKLTSTPTDATK |
| (amino acid) | LNTTDPSSDDEDLATSGSGSGEREPHTTSDAVTKQGLSSTMPPTPSPQP |
| | STPQQGGNNTNHSQDAVTELDKNNTTAQPSMPPHNTTTISTNNTSKHNF |
| | STLSAPLQNTTNDNTQSTITENEQTSAPSITTLPPTGNPTTAKSTSSKKGP |
| | ATTAPNTTNEHFTSPPPTPSSTAQHLVYFRRKRSILWREGDMFPFLDGLI |
| | NAPIDFDPVPNTKTIFDESSSSGASAEEDQHASPNISLTLSYFPNINENTAY |
| | SGENENDCDAELRIWSVQEDDLAAGLSWIPFFGPGIEGLYTAVLIKNQNN |
| | LVCRLRRLANQTAKSLELLLRVTTEERTFSLINRHAIDFLLTRWGGTCKVL |
| | GPDCCIGIEDLSKNISEQIDQIKKDEQKEGTGWGLGGKWWTSD |
| SEQ ID NO: | ATGAAGAAGATCAACGAGGGCCTGCTGGACAGCAAGATCCTGAGCGC |
| 2042 | CTTCAACACCGTGATCGCCCTGCTGGGCAGCATCGTGATCATTGTGAT |
| Nipah virus | GAACATCATGATCATCCAGAACTACACCCGGAGCACCGACAACCAGG |
| NIV G gene | CCGTGATCAAGGACGCCCTGCAGGGAATCCAGCAGCAGATCAAGGG |
| based on | CCTGGCCGACAAGATCGGCACCGAGATCGGCCCCAAAGTGAGCCTG |
| Levroney et | ATCGACACCAGCAGCACCATCACCATCCCCGCCAACATCGGCCTGCT |
| al 2005 | GGGATCCAAGATCAGCCAGAGCACCGCCAGCATCAACGAGAACGTGA |
| publication | ACGAGAAGTGCAAGTTCACCCTGCCCCCCCTGAAGATCCACGAGTGC |
| (nucleic | AACATCAGCTGCCCCAACCCCCTGCCCTTCCGGGAGTACCGGCCCCA |
| acid) | GACCGAGGGCGTGAGCAACCTGGTGGGCCTGCCCAACAACATCTGC |
| | CTGCAGAAAACCAGCAACCAGATCCTGAAGCCCAAGCTGATCTCCTAC |
| | ACCCTGCCCGTGGTGGGCCAGAGCGGCACCTGCATCACCGACCCCC |
| | TGCTGGCCATGGACGAGGGCTACTTCGCCTACAGCCACCTGGAGCG |
| | GATCGGCAGCTGCAGCCGGGGAGTGAGCAAGCAGCGGATCATCGGC |
| | GTGGGCGAAGTGCTGGACCGGGGCGACGAAGTGCCCAGCCTGTTCA |
| | TGACCAACGTGTGGACCCCCCCCAACCCCAACACCGTGTACCACTGC |
| | AGCGCCGTGTACAACAACGAGTTCTACTACGTGCTGTGCGCCGTGAG |
| | CACCGTGGGCGACCCCATCCTGAACAGCACCTACTGGAGCGGCAGC |
| | CTGATGATGACCCGGCTGGCCGTGAAGCCTAAGAGCAACGGCGGAG |
| | GCTACAACCAGCACCAGCTGGCCCTGCGGAGCATCGAGAAGGGCCG |
| | GTACGACAAAGTGATGCCCTACGGCCCCAGCGGCATCAAGCAGGGC |
| | GACACCCTGTACTTCCCCGCCGTGGGCTTCCTGGTGCGGACCGAGTT |
| | CAAGTACAACGACAGCAACTGCCCCATCACCAAGTGCCAGTACAGCA |
| | AGCCCGAGAACTGCCGGCTGAGCATGGGCATCCGGCCCAACAGCCA |
| | CTACATCCTGCGGAGCGGCCTGCTGAAGTACAACCTGAGCGACGGCG |
| | AGAACCCCAAAGTGGTGTTCATCGAGATCAGCGACCAGAGACTGAGC |
| | ATCGGCAGCCCCAGCAAGATCTACGACAGCCTGGGCCAGCCCGTGTT |
| | CTACCAGGCCAGCTTCAGCTGGGACACCATGATCAAGTTCGGCGACG |
| | TGCTGACCGTGAACCCCCTGGTGGTGAACTGGCGGAACAATACCGTG |
| | ATCTCTAGACCCGGCCAGAGCCAGTGCCCCCGGTTCAACACCTGCCC |
| | CGAGATCTGCTGGGAGGGCGTGTACAACGACGCCTTCCTGATCGACC |
| | GGATCAACTGGATCAGCGCCGGAGTGTTCCTGGATAGCAACCAGACC |
| | GCCGAGAATCCCGTGTTCACCGTGTTTAAGGACAACGAGATCCTGTAC |
| | AGAGCCCAGCTGGCCAGCGAGGACACCAACGCCCAGAAAACCATCAC |
| | CAACTGCTTCCTGCTGAAGAATAAGATCTGGTGCATCAGCCTGGTGGA |
| | GATCTACGATACCGGCGACAACGTGATCAGGCCCAAGCTGTTCGCCG |
| | TGAAGATCCCCGAGCAGTGCTACCCCTACGACGTGCCCGACTACGCC |
| SEQ ID NO: | MKKINEGLLDSKILSAFNTVIALLGSIVIIVMNIMIIQNYTRSTDNQAVIKDALQ |
| 2043 | GIQQQIKGLADKIGTEIGPKVSLIDTSSTITIPANIGLLGSKISQSTASINENV |
| Nipah virus | NEKCKFTLPPLKIHECNISCPNPLPFREYRPQTEGVSNLVGLPNNICLQKT |
| NIV G gene | SNQILKPKLISYTLPWGQSGTCITDPLLAMDEGYFAYSHLERIGSCSRGV |
| based on | SKQRIIGVGEVLDRGDEVPSLFMTNVWTPPNPNTVYHCSAVYNNEFYYVL |
| Levroney et | CAVSTVGDPILNSTYWSGSLMMTRLAVKPKSNGGGYNQHQLALRSIEKG |
| al 2005 | RYDKVMPYGPSGIKQGDTLYFPAVGFLVRTEFKYNDSNCPITKCQYSKPE |
| publication | NCRLSMGIRPNSHYILRSGLLKYNLSDGENPKVVFIEISDQRLSIGSPSKIY |
| (amino acid) | DSLGQPVFYQASFSWDTMIKFGDVLTVNPLVVNWRNNTVISRPGQSQCP |
| | RFNTCPEICWEGVYNDAFLIDRINWISAGVFLDSNQTAENPVFTVFKDNEI |
| | LYRAQLASEDTNAQKTITNCFLLKNKIWCISLVEIYDTGDNVIRPKLFAVKIP |
| | EQCYPYDVPDYA |
| SEQ ID NO: | ATGGTGGTGATCCTGGACAAGCGGTGCTACTGCAACCTGCTGATCCT |
| 2044 | GATCCTGATGATCAGCGAGTGCAGCGTGGGCATCCTGCACTACGAGA |
| Nipah virus | AGCTGAGCAAGATCGGCCTGGTGAAGGGCGTGACCCGGAAGTACAA |
| NiV F gene, | GATCAAGAGCAACCCCCTGACCAAGGACATCGTGATCAAGATGATCC |
| based on | CCAACGTGAGCAACATGAGCCAGTGCACCGGCAGCGTGATGGAGAAC |
| Levroney et | TACAAGACCCGGCTGAACGGCATCCTGACCCCCATCAAGGGCGCCCT |
| al 2005 | GGAGATCTACAAGAACAACACCCACGACCTGGTGGGCGACGTGCGG |
| publication | CTGGCCGGCGTGATCATGGCCGGCGTGGCCATCGGCATCGCCACAG |
| (nucleic | CCGCCCAGATCACCGCCGGAGTGGCCCTGTACGAGGCCATGAAGAA |
| acid) | CGCCGACAACATCAACAAGCTGAAGAGCAGCATCGAGAGCACCAACG |
| | AGGCCGTGGTGAAGCTGCAGGAGACCGCCGAGAAAACCGTGTACGT |
| | GCTGACCGCCCTGCAGGACTACATCAACACCAACCTGGTGCCCACCA |
| | TCGACAAGATCAGCTGCAAGCAGACCGAGCTGAGCCTGGACCTGGCC |
| | CTGAGCAAGTACCTGAGCGACCTGCTGTTCGTGTTCGGCCCCAACCT |
| | GCAGGACCCCGTGAGCAACAGCATGACCATCCAGGCCATCAGCCAG |
| | GCCTTCGGCGGCAACTACGAGACCCTGCTGCGGACCCTGGGCTACG |
| | CCACCGAGGACTTCGACGACCTGCTGGAGAGCGACAGCATCACCGG |
| | CCAGATCATCTACGTGGACCTGAGCAGCTACTACATCATCGTGCGGG |
| | TGTACTTCCCCATCCTGACCGAGATCCAGCAGGCCTACATCCAGGAG |
| | CTGCTGCCCGTGAGCTTCAACAACGACAACAGCGAGTGGATCAGCAT |
| | CGTGCCCAACTTCATCCTGGTGCGGAACACCCTGATCAGCAACATCG |
| | AGATCGGCTTCTGCCTGATCACCAAGCGGAGCGTGATCTGCAACCAG |
| | GACTACGCCACCCCCATGACCAACAACATGCGGGAGTGCCTGACCGG |
| | CAGCACCGAGAAGTGCCCCAGGGAGCTGGTGGTGAGCAGCCACGTG |
| | CCCCGGTTCGCCCTGAGCAACGGCGTGCTGTTCGCCAACTGCATCAG |
| | CGTGACCTGCCAGTGCCAGACCACCGGCAGAGCCATCAGCCAGAGC |
| | GGCGAGCAGACCCTGCTGATGATCGACAACACCACCTGCCCCACCGC |
| | CGTGCTGGGCAACGTGATCATCAGCCTGGGCAAGTATCTGGGCAGCG |
| | TGAACTACAACAGCGAGGGCATCGCCATCGGCCCTCCCGTGTTCACC |
| | GACAAGGTGGACATCAGCAGCCAGATCAGCAGCATGAACCAGAGCCT |
| | GCAGCAGAGCAAGGATTACATCAAGGAGGCCCAGCGGCTGCTGGAC |
| | ACCGTGAACCCCAGCCTGATCAGCATGCTGTCCATGATCATCCTGTAC |
| | GTGCTGAGCATCGCCAGCCTGTGCATCGGCCTGATCACCTTCATCAG |
| | CTTCATCATCGTGGAGAAGAAGCGGAACACC |
| SEQ ID NO: | MVVILDKRCYCNLLILILMISECSVGILHYEKLSKIGLVKGVTRKYKIKSNPLT |
| 2045 | KDIVIKMIPNVSNMSQCTGSVMENYKTRLNGILTPIKGALEIYKNNTHDLVG |
| Nipah virus | DVRLAGVIMAGVAIG1ATAAQITAGVALYEAMKNADN1NKLKSSIESTNEAV |
| NiV F gene, | VKLQETAEKTVYVLTALQDYINTNLVPTIDKISCKQTELSLDLALSKYLSDLL |
| based on | FVFGPNLQDPVSNSMTIQAISQAFGGNYETLLRTLGYATEDFDDLLESDSI |
| Levroney et | TGQIIYVDLSSYYIIVRVYFPILTEIQQAYIQELLPVSFNNDNSEWISIVPNFIL |
| al 2005 | VRNTLISNIEIGFCLITKRSVICNQDYATPMTNNMRECLTGSTEKCPRELVV |
| publication | SSHVPRFALSNGVLFANCISVTCQCQTTGRAISQSGEQTLLMIDNTTCPTA |
| (amino acid) | VLGNVIISLGKYLGSVNYNSEGIAIGPPVFTDKVDISSQISSMNQSLQQSKD |
| | YIKEAQRLLDTVNPSLISMLSMIILYVLSIASLCIGLITFISFIIVEKKRNT |

[0170] In certain embodiments, the pseudotyped recombinant lyssavirus particle comprises a heterologous envelope protein that is a variant of any one of the exemplary envelope proteins disclosed in Table 1. In certain embodiments, the variant is encoded by a nucleic acid sequence that is about 60%, about 65%, about 70%, about 75%, about 80%, about 81%, about 82%, about 83%, about 84%, about 85%, about 86%, about 87%, about 88%, about 89%, about 90%, about 91%, about 92%, about 93%, about 94%, about 95%, about 96%, about 97%, about 98%, about 99% identical (but not 100% identical) to any one of the nucleic acid sequences disclosed in Table 1 or is a variant that is at least 95%, 90%, 85%, 80%, 75%, 70%, 65%, 60%, 55%, 50%, 45%, 40%, 35%, 30%, or less identical (but not 100% identically) to any one of the envelope proteins disclosed in Table 1.

[0171] In certain embodiments, the pseudotyped recombinant lyssavirus particle comprises a heterologous rabies virus (RABV) envelope protein encoded by a nucleic acid sequence that is about 60%, about 65%, about 70%, about 75%, about 80%, about 81%, about 82%, about 83%, about 84%, about 85%, about 86%, about 87%, about 88%, about 89%, about 90%, about 91%, about 92%, about 93%, about 94%, about 95%, about 96%, about 97%, about 98%, about 99% identical to the nucleic acid sequence set forth in SEQ ID NO: 2000. In certain embodiments, the pseudotyped recombinant lyssavirus particle comprises a heterologous RABV envelope protein encoded by a nucleic acid sequence set forth in SEQ ID NO: 2000. In certain embodiments, the pseudotyped recombinant lyssavirus particle comprises a heterologous RABV envelope protein encoded by a nucleic acid sequence consisting of the a nucleic acid sequence set forth in SEQ ID NO: 2000. In certain embodiments, the heterologous RABV envelope protein comprises an amino acid sequence that is about 80%, about 81%, about 82%, about 83%, about 84%, about 85%, about 86%, about 87%, about 88%, about 89%, about 90%, about 91%, about 92%, about 93%, about 94%, about 95%, about 96%, about 97%, about 98%, about 99% identical to the amino acid sequence set forth in SEQ ID NO: 2001. In certain embodiments, the heterologous RABV envelope protein comprises an amino acid sequence set forth in SEQ ID NO: 2001. In certain embodiments, the heterologous RABV envelope protein consists of the amino acid sequence set forth in SEQ ID NO: 2001.

[0172] In certain embodiments, the pseudotyped recombinant lyssavirus particle comprises a heterologous Sindbis to to virus (SINV) envelope protein encoded by a nucleic acid sequence that is about 60%, about 65%, about 70%, about 75%, about 80%, about 81%, about 82%, about 83%, about 84%, about 85%, about 86%, about 87%, about 88%, about 89%, about 90%, about 91%, about 92%, about 93%, about 94%, about 95%, about 96%, about 97%, about 98%, about 99% identical to the nucleic acid sequence set forth in SEQ ID NO: 2002. In certain embodiments, the pseudotyped recombinant lyssavirus particle comprises a heterologous SINV envelope protein encoded by a nucleic acid sequence set forth in SEQ ID NO: 2002. In certain embodiments, the pseudotyped recombinant lyssavirus particle comprises a heterologous SINV envelope protein encoded by a nucleic acid sequence consisting of the a nucleic acid sequence set forth in SEQ ID NO: 2002. In certain embodiments, the heterologous SINV envelope protein comprises an amino acid sequence that is about 80%, about 81%, about 82%, about 83%, about 84%, about 85%, about 86%, about 87%, about 88%, about 89%, about 90%, about 91%, about 92%, about 93%, about 94%, about 95%, about 96%, about 97%, about 98%, about 99% identical to the amino acid sequence set forth in SEQ ID NO: 2003. In certain embodiments, the heterologous SINV envelope protein comprises an amino acid sequence set forth in SEQ ID NO: 2003. In certain embodiments, the heterologous SINV envelope protein consists of the amino acid sequence set forth in SEQ ID NO: 2003.

[0173] In certain embodiments, the pseudotyped recombinant lyssavirus particle comprises a heterologous Sindbis girdwood virus (SINV) envelope protein encoded by a nucleic acid sequence that is about 60%, about 65%, about 70%, about 75%, about 80%, about 81%, about 82%, about 83%, about 84%, about 85%, about 86%, about 87%, about 88%, about 89%, about 90%, about 91%, about 92%, about 93%, about 94%, about 95%, about 96%, about 97%, about 98%, about 99% identical to the nucleic acid sequence set forth in SEQ ID NO: 2004. In certain embodiments, the pseudotyped recombinant lyssavirus particle comprises a heterologous SINV envelope protein encoded by a nucleic acid sequence set forth in SEQ ID NO: 2004. In certain embodiments, the pseudotyped recombinant lyssavirus particle comprises a heterologous SINV envelope protein encoded by a nucleic acid sequence consisting of the a nucleic acid sequence set forth in SEQ ID NO: 2004. In certain embodiments, the heterologous SINV envelope protein comprises an amino acid sequence that is about 80%, about 81%, about 82%, about 83%, about 84%, about 85%, about 86%, about 87%, about 88%, about 89%, about 90%, about 91%, about 92%, about 93%, about 94%, about 95%, about 96%, about 97%, about 98%, about 99% identical to the amino acid sequence set forth in SEQ ID NO: 2005. In certain embodiments, the heterologous SINV envelope protein comprises an amino acid sequence set forth in SEQ ID NO: 2005. In certain embodiments, the heterologous SINV envelope protein consists of the amino acid sequence set forth in SEQ ID NO: 2005.

[0174] In certain embodiments, the pseudotyped recombinant lyssavirus particle comprises a heterologous Semliki Forest virus (SFV) envelope protein encoded by a nucleic acid sequence that is about 60%, about 65%, about 70%, about 75%, about 80%, about 81%, about 82%, about 83%, about 84%, about 85%, about 86%, about 87%, about 88%, about 89%, about 90%, about 91%, about 92%, about 93%, about 94%, about 95%, about 96%, about 97%, about 98%, about 99% identical to the nucleic acid sequence set forth in SEQ ID NO: 2006. In certain embodiments, the pseudotyped recombinant lyssavirus particle comprises a heterologous SFV envelope protein encoded by a nucleic acid sequence set forth in SEQ ID NO: 2006. In certain embodiments, the pseudotyped recombinant lyssavirus particle comprises a heterologous SFV envelope protein encoded by a nucleic acid sequence consisting of the a nucleic acid sequence set forth in SEQ ID NO: 2006. In certain embodiments, the heterologous SFV envelope protein comprises an amino acid sequence that is about 80%, about 81%, about 82%, about 83%, about 84%, about 85%, about 86%, about 87%, about 88%, about 89%, about 90%, about 91%, about 92%, about 93%, about 94%, about 95%, about 96%, about 97%, about 98%, about 99% identical to the amino acid sequence set forth in SEQ ID NO: 2007. In certain embodiments, the heterologous SFV envelope protein comprises an amino acid sequence set forth in SEQ ID NO: 2007. In certain embodiments, the heterologous SFV envelope protein consists of the amino acid sequence set forth in SEQ ID NO: 2007.

[0175] In certain embodiments, the pseudotyped recombinant lyssavirus particle comprises a heterologous Chikungunya virus (strain 37997) (CHIKV) envelope protein encoded by a nucleic acid sequence that is about 60%, about 65%, about 70%, about 75%, about 80%, about 81%, about 82%, about 83%, about 84%, about 85%, about 86%, about 87%, about 88%, about 89%, about 90%, about 91%, about 92%, about 93%, about 94%, about 95%, about 96%, about 97%, about 98%, about 99% identical to the nucleic acid sequence set forth in SEQ ID NO: 2008. In certain embodiments, the pseudotyped recombinant lyssavirus particle comprises a heterologous CHIKV envelope protein encoded by a nucleic acid sequence set forth in SEQ ID NO: 2008. In certain embodiments, the pseudotyped recombinant lyssavirus particle comprises a heterologous CHIKV envelope protein encoded by a nucleic acid sequence consisting of the a nucleic acid sequence set forth in SEQ ID NO: 2008. In certain embodiments, the heterologous CHIKV envelope protein comprises an amino acid sequence that is about 80%, about 81%, about 82%, about 83%, about 84%, about 85%, about 86%, about 87%, about 88%, about 89%, about 90%, about 91%, about 92%, about 93%, about 94%, about 95%, about 96%, about 97%, about 98%, about 99% identical to the amino acid sequence set forth in SEQ ID NO: 2009. In certain embodiments, the heterologous CHIKV envelope protein comprises an amino acid sequence set forth in SEQ ID NO: 2009. In certain embodiments, the heterologous CHIKV envelope protein consists of the amino acid sequence set forth in SEQ ID NO: 2009.

[0176] In certain embodiments, the pseudotyped recombinant lyssavirus particle comprises a heterologous Mayaro virus (strain Beh407) (MAYV) envelope protein encoded by a nucleic acid sequence that is about 60%, about 65%, about 70%, about 75%, about 80%, about 81%, about 82%, about 83%, about 84%, about 85%, about 86%, about 87%, about 88%, about 89%, about 90%, about 91%, about 92%, about 93%, about 94%, about 95%, about 96%, about 97%, about 98%, about 99% identical to the nucleic acid sequence set forth in SEQ ID NO: 2010. In certain embodiments, the pseudotyped recombinant lyssavirus particle comprises a heterologous MAYV envelope protein encoded by a nucleic acid sequence set forth in SEQ ID NO: 2010. In certain embodiments, the pseudotyped recombinant lyssavirus particle comprises a heterologous MAYV envelope protein encoded by a nucleic acid sequence consisting of the a nucleic acid sequence set forth in SEQ ID NO: 2010. In certain embodiments, the heterologous MAYV envelope protein comprises an amino acid sequence that is about 80%, about 81%, about 82%, about 83%, about 84%, about 85%, about 86%, about 87%, about 88%, about 89%, about 90%, about 91%, about 92%, about 93%, about 94%, about 95%, about 96%, about 97%, about 98%, about 99% identical to the amino acid sequence set forth in SEQ ID NO: 2011. In certain embodiments, the heterologous MAYV envelope protein comprises an amino acid sequence set forth in SEQ ID NO: 2011. In certain embodiments, the heterologous MAYV envelope protein consists of the amino acid sequence set forth in SEQ ID NO: 2011.

[0177] In certain embodiments, the pseudotyped recombinant lyssavirus particle comprises a heterologous O'nyong-nyong virus (strain MP30) (ONNV) envelope protein encoded by a nucleic acid sequence that is about 60%, about 65%, about 70%, about 75%, about 80%, about 81%, about 82%, about 83%, about 84%, about 85%, about 86%, about 87%, about 88%, about 89%, about 90%, about 91%, about 92%, about 93%, about 94%, about 95%, about 96%, about 97%, about 98%, about 99% identical to the nucleic acid sequence set forth in SEQ ID NO: 2012. In certain embodiments, the pseudotyped recombinant lyssavirus particle comprises a heterologous RABV envelope protein encoded by a nucleic acid sequence set forth in SEQ ID NO: 2012. In certain embodiments, the pseudotyped recombinant lyssavirus particle comprises a heterologous RABV envelope protein encoded by a nucleic acid sequence consisting of the a nucleic acid sequence set forth in SEQ ID NO: 2012. In certain embodiments, the heterologous RABV envelope protein comprises an amino acid sequence that is about 80%, about 81%, about 82%, about 83%, about 84%, about 85%, about 86%, about 87%, about 88%, about 89%, about 90%, about 91%, about 92%, about 93%, about 94%, about 95%, about 96%, about 97%, about 98%, about 99% identical to the amino acid sequence set forth in SEQ ID NO: 2013. In certain embodiments, the heterologous RABV envelope protein comprises an amino acid sequence set forth in SEQ ID NO: 2013. In certain embodiments, the heterologous RABV envelope protein consists of the amino acid sequence set forth in SEQ ID NO: 2013.

[0178] In certain embodiments, the pseudotyped recombinant lyssavirus particle comprises a heterologous Ross virus (strain RRV6) (RRV) envelope protein encoded by a nucleic acid sequence that is about 60%, about 65%, about 70%, about 75%, about 80%, about 81%, about 82%, about 83%, about 84%, about 85%, about 86%, about 87%, about 88%, about 89%, about 90%, about 91%, about 92%, about 93%, about 94%, about 95%, about 96%, about 97%, about 98%, about 99% identical to the nucleic acid sequence set forth in SEQ ID NO: 2014. In certain embodiments, the pseudotyped recombinant lyssavirus particle comprises a heterologous RRV envelope protein encoded by a nucleic acid sequence set forth in SEQ ID NO: 2014. In certain embodiments, the pseudotyped recombinant lyssavirus particle comprises a heterologous RRV envelope protein encoded by a nucleic acid sequence consisting of the a nucleic acid sequence set forth in SEQ ID NO: 2014. In certain embodiments, the heterologous RRV envelope protein comprises an amino acid sequence that is about 80%, about 81%, about 82%, about 83%, about 84%, about 85%, about 86%, about 87%, about 88%, about 89%, about 90%, about 91%, about 92%, about 93%, about 94%, about 95%, about 96%, about 97%, about 98%, about 99% identical to the amino acid sequence set forth in SEQ ID NO: 2015. In certain embodiments, the heterologous RRV envelope protein comprises an amino acid sequence set forth in SEQ ID NO: 2015. In certain embodiments, the heterologous RRV envelope protein consists of the amino acid sequence set forth in SEQ ID NO: 2015.

[0179] In certain embodiments, the pseudotyped recombinant lyssavirus particle comprises a heterologous Western equine encephalitis virus (strain CBA83) (WEEV) envelope protein encoded by a nucleic acid sequence that is about 60%, about 65%, about 70%, about 75%, about 80%, about 81%, about 82%, about 83%, about 84%, about 85%, about 86%, about 87%, about 88%, about 89%, about 90%, about 91%, about 92%, about 93%, about 94%, about 95%, about 96%, about 97%, about 98%, about 99% identical to the nucleic acid sequence set forth in SEQ ID NO: 2016. In certain embodiments, the pseudotyped recombinant lyssavirus particle comprises a heterologous WEEV envelope protein encoded by a nucleic acid sequence set forth in SEQ ID NO: 2016. In certain embodiments, the pseudotyped recombinant lyssavirus particle comprises a heterologous WEEV envelope protein encoded by a nucleic acid sequence consisting of the a nucleic acid sequence set forth in SEQ ID NO: 2016. In certain embodiments, the heterologous WEEV envelope protein comprises an amino acid sequence that is about 80%, about 81%, about 82%, about 83%, about 84%, about 85%, about 86%, about 87%, about 88%, about 89%, about 90%, about 91%, about 92%, about 93%, about 94%, about 95%, about 96%, about 97%, about 98%, about 99% identical to the amino acid sequence set forth in SEQ ID NO: 2017. In certain embodiments, the heterologous WEEV envelope protein comprises an amino acid sequence set forth in SEQ ID NO: 2017. In certain embodiments, the heterologous WEEV envelope protein consists of the amino acid sequence set forth in SEQ ID NO: 2017.

[0180] In certain embodiments, the pseudotyped recombinant lyssavirus particle comprises a heterologous Eastern equine encephalitis virus (strain Pe6) (EEEV) envelope protein encoded by a nucleic acid sequence that is about 60%, about 65%, about 70%, about 75%, about 80%, about 81%, about 82%, about 83%, about 84%, about 85%, about 86%, about 87%, about 88%, about 89%, about 90%, about 91%, about 92%, about 93%, about 94%, about 95%, about 96%, about 97%, about 98%, about 99% identical to the nucleic acid sequence set forth in SEQ ID NO: 2018. In certain embodiments, the pseudotyped recombinant lyssavirus particle comprises a heterologous EEEV envelope protein encoded by a nucleic acid sequence set forth in SEQ ID NO: 2018. In certain embodiments, the pseudotyped recombinant lyssavirus particle comprises a heterologous EEEV envelope protein encoded by a nucleic acid sequence consisting of the a nucleic acid sequence set forth in SEQ ID NO: 2018. In certain embodiments, the heterologous EEEV envelope protein comprises an amino acid sequence that is about 80%, about 81%, about 82%, about 83%, about 84%, about 85%, about 86%, about 87%, about 88%, about 89%, about 90%, about 91%, about 92%, about 93%, about 94%, about 95%, about 96%, about 97%, about 98%, about 99% identical to the amino acid sequence set forth in SEQ ID NO: 2019. In certain embodiments, the heterologous EEEV envelope protein comprises an amino acid sequence set forth in SEQ ID NO: 2019. In certain embodiments, the heterologous EEEV envelope protein consists of the amino acid sequence set forth in SEQ ID NO: 2019.

[0181] In certain embodiments, the pseudotyped recombinant lyssavirus particle comprises a heterologous Venezuelan equine encephalitis virus (strain Tc83) (VEEV) envelope protein encoded by a nucleic acid sequence that is about 60%, about 65%, about 70%, about 75%, about 80%, about 81%, about 82%, about 83%, about 84%, about 85%, about 86%, about 87%, about 88%, about 89%, about 90%, about 91%, about 92%, about 93%, about 94%, about 95%, about 96%, about 97%, about 98%, about 99% identical to the nucleic acid sequence set forth in SEQ ID NO: 2020. In certain embodiments, the pseudotyped recombinant lyssavirus particle comprises a heterologous VEEV envelope protein encoded by a nucleic acid sequence set forth in SEQ ID NO: 2020. In certain embodiments, the pseudotyped recombinant lyssavirus particle comprises a heterologous VEEV envelope protein encoded by a nucleic acid sequence consisting of the a nucleic acid sequence set forth in SEQ ID NO: 2020. In certain embodiments, the heterologous VEEV envelope protein comprises an amino acid sequence that is about 80%, about 81%, about 82%, about 83%, about 84%, about 85%, about 86%, about 87%, about 88%, about 89%, about 90%, about 91%, about 92%, about 93%, about 94%, about 95%, about 96%, about 97%, about 98%, about 99% identical to the amino acid sequence set forth in SEQ ID NO: 2021. In certain embodiments, the heterologous VEEV envelope protein comprises an amino acid sequence set forth in SEQ ID NO: 2021. In certain embodiments, the heterologous VEEV envelope protein consists of the amino acid sequence set forth in SEQ ID NO: 2021.

[0182] In certain embodiments, the pseudotyped recombinant lyssavirus particle comprises a heterologous mokola virus (MOKV) envelope protein encoded by a nucleic acid sequence that is about 60%, about 65%, about 70%, about 75%, about 80%, about 81%, about 82%, about 83%, about 84%, about 85%, about 86%, about 87%, about 88%, about 89%, about 90%, about 91%, about 92%, about 93%, about 94%, about 95%, about 96%, about 97%, about 98%, about 99% identical to the nucleic acid sequence set forth in SEQ ID NO: 2022. In certain embodiments, the pseudotyped recombinant lyssavirus particle comprises a heterologous MOKV envelope protein encoded by a nucleic acid sequence set forth in SEQ ID NO: 2022. In certain embodiments, the pseudotyped recombinant lyssavirus particle comprises a heterologous MOKV envelope protein encoded by a nucleic acid sequence consisting of the a nucleic acid sequence set forth in SEQ ID NO: 2022. In certain embodiments, the heterologous MOKV envelope protein comprises an amino acid sequence that is about 80%, about 81%, about 82%, about 83%, about 84%, about 85%, about 86%, about 87%, about 88%, about 89%, about 90%, about 91%, about 92%, about 93%, about 94%, about 95%, about 96%, about 97%, about 98%, about 99% identical to the amino acid sequence set forth in SEQ ID NO: 2023. In certain embodiments, the heterologous MOKV envelope protein comprises an amino acid sequence set forth in SEQ ID NO: 2023. In certain embodiments, the heterologous MOKV envelope protein consists of the amino acid sequence set forth in SEQ ID NO: 2023.

[0183] In certain embodiments, the pseudotyped recombinant lyssavirus particle comprises a heterologous vessiculo stomatisvirus (VSV) envelope protein encoded by a nucleic acid sequence that is about 60%, about 65%, about 70%, about 75%, about 80%, about 81%, about 82%, about 83%, about 84%, about 85%, about 86%, about 87%, about 88%, about 89%, about 90%, about 91%, about 92%, about 93%, about 94%, about 95%, about 96%, about 97%, about 98%, about 99% identical to the nucleic acid sequence set forth in SEQ ID NO: 2024. In certain embodiments, the pseudotyped recombinant lyssavirus particle comprises a heterologous VSV envelope protein encoded by a nucleic acid sequence set forth in SEQ ID NO: 2024. In certain embodiments, the pseudotyped recombinant lyssavirus particle comprises a heterologous VSV envelope protein encoded by a nucleic acid sequence consisting of the a nucleic acid sequence set forth in SEQ ID NO: 2024. In certain embodiments, the heterologous VSV envelope protein comprises an amino acid sequence that is about 80%, about 81%, about 82%, about 83%, about 84%, about 85%, about 86%, about 87%, about 88%, about 89%, about 90%, about 91%, about 92%, about 93%, about 94%, about 95%, about 96%, about 97%, about 98%, about 99% identical to the amino acid sequence set forth in SEQ ID NO: 2025. In certain embodiments, the heterologous VSV envelope protein comprises an amino acid sequence set forth in SEQ ID NO: 2025. In certain embodiments, the heterologous VSV envelope protein consists of the amino acid sequence set forth in SEQ ID NO: 2025.

[0184] In certain embodiments, the pseudotyped recombinant lyssavirus particle comprises a heterologous cocal virus (COCV) envelope protein encoded by a nucleic acid sequence that is about 60%, about 65%, about 70%, about 75%, about 80%, about 81%, about 82%, about 83%, about 84%, about 85%, about 86%, about 87%, about 88%, about 89%, about 90%, about 91%, about 92%, about 93%, about 94%, about 95%, about 96%, about 97%, about 98%, about 99% identical to the nucleic acid sequence set forth in SEQ ID NO: 2026. In certain embodiments, the pseudotyped recombinant lyssavirus particle comprises a heterologous COCV envelope protein encoded by a nucleic acid sequence set forth in SEQ ID NO: 2026. In certain embodiments, the pseudotyped recombinant lyssavirus particle comprises a heterologous COCV envelope protein encoded by a nucleic acid sequence consisting of the a nucleic acid sequence set forth in SEQ ID NO: 2026. In certain embodiments, the heterologous COCV envelope protein comprises an amino acid sequence that is about 80%, about 81%, about 82%, about 83%, about 84%, about 85%, about 86%, about 87%, about 88%, about 89%, about 90%, about 91%, about 92%, about 93%, about 94%, about 95%, about 96%, about 97%, about 98%, about 99% identical to the amino acid sequence set forth in SEQ ID NO: 2027. In certain embodiments, the heterologous COCV envelope protein comprises an amino acid sequence set forth in SEQ ID NO: 2027. In certain embodiments, the heterologous COCV envelope protein consists of the amino acid sequence set forth in SEQ ID NO: 2027.

[0185] In certain embodiments, the pseudotyped recombinant lyssavirus particle comprises a heterologous ekpoma virus 1 (EKV1) envelope protein encoded by a nucleic acid sequence that is about 60%, about 65%, about 70%, about 75%, about 80%, about 81%, about 82%, about 83%, about 84%, about 85%, about 86%, about 87%, about 88%, about 89%, about 90%, about 91%, about 92%, about 93%, about 94%, about 95%, about 96%, about 97%, about 98%, about 99% identical to the nucleic acid sequence set forth in SEQ ID NO: 2028. In certain embodiments, the pseudotyped recombinant lyssavirus particle comprises a heterologous EKV1 envelope protein encoded by a nucleic acid sequence set forth in SEQ ID NO: 2028. In certain embodiments, the pseudotyped recombinant lyssavirus particle comprises a heterologous EKV1 envelope protein encoded by a nucleic acid sequence consisting of the a nucleic acid sequence set forth in SEQ ID NO: 2028. In certain embodiments, the heterologous EKV1 envelope protein comprises an amino acid sequence that is about 80%, about 81%, about 82%, about 83%, about 84%, about 85%, about 86%, about 87%, about 88%, about 89%, about 90%, about 91%, about 92%, about 93%, about 94%, about 95%, about 96%, about 97%, about 98%, about 99% identical to the amino acid sequence set forth in SEQ ID NO: 2029. In certain embodiments, the heterologous EKV1 envelope protein comprises an amino acid sequence set forth in SEQ ID NO: 2029. In certain embodiments, the heterologous EKV1 envelope protein consists of the amino acid sequence set forth in SEQ ID NO: 2029.

[0186] In certain embodiments, the pseudotyped recombinant lyssavirus particle comprises a heterologous ekpoma virus 2 (EKV2) envelope protein encoded by a nucleic acid sequence that is about 60%, about 65%, about 70%, about 75%, about 80%, about 81%, about 82%, about 83%, about 84%, about 85%, about 86%, about 87%, about 88%, about 89%, about 90%, about 91%, about 92%, about 93%, about 94%, about 95%, about 96%, about 97%, about 98%, about 99% identical to the nucleic acid sequence set forth in SEQ ID NO: 2030. In certain embodiments, the pseudotyped recombinant lyssavirus particle comprises a heterologous EKV2 envelope protein encoded by a nucleic acid sequence set forth in SEQ ID NO: 2030. In certain embodiments, the pseudotyped recombinant lyssavirus particle comprises a heterologous EKV2 envelope protein encoded by a nucleic acid sequence consisting of the a nucleic acid sequence set forth in SEQ ID NO: 2030. In certain embodiments, the heterologous EKV2 envelope protein comprises an amino acid sequence that is about 80%, about 81%, about 82%, about 83%, about 84%, about 85%, about 86%, about 87%, about 88%, about 89%, about 90%, about 91%, about 92%, about 93%, about 94%, about 95%, about 96%, about 97%, about 98%, about 99% identical to the amino acid sequence set forth in SEQ ID NO: 2031. In certain embodiments, the heterologous EKV2 envelope protein comprises an amino acid sequence set forth in SEQ ID NO: 2031. In certain embodiments, the heterologous EKV2 envelope protein consists of the amino acid sequence set forth in SEQ ID NO: 2031.

[0187] In certain embodiments, the pseudotyped recombinant lyssavirus particle comprises a heterologous Hepatitis C virus HCV E1-E2 gene, HC-J1 strain (HCV) envelope protein encoded by a nucleic acid sequence that is about 60%, about 65%, about 70%, about 75%, about 80%, about 81%, about 82%, about 83%, about 84%, about 85%, about 86%, about 87%, about 88%, about 89%, about 90%, about 91%, about 92%, about 93%, about 94%, about 95%, about 96%, about 97%, about 98%, about 99% identical to the nucleic acid sequence set forth in SEQ ID NO: 2032. In certain embodiments, the pseudotyped recombinant lyssavirus particle comprises a heterologous HCV envelope protein encoded by a nucleic acid sequence set forth in SEQ ID NO: 2032. In certain embodiments, the pseudotyped recombinant lyssavirus particle comprises a heterologous HCV envelope protein encoded by a nucleic acid sequence consisting of the a nucleic acid sequence set forth in SEQ ID NO: 2032. In certain embodiments, the heterologous HCV envelope protein comprises an amino acid sequence that is about 80%, about 81%, about 82%, about 83%, about 84%, about 85%, about 86%, about 87%, about 88%, about 89%, about 90%, about 91%, about 92%, about 93%, about 94%, about 95%, about 96%, about 97%, about 98%, about 99% identical to the amino acid sequence set forth in SEQ ID NO: 2033. In certain embodiments, the heterologous HCV envelope protein comprises an amino acid sequence set forth in SEQ ID NO: 2033. In certain embodiments, the heterologous HCV envelope protein consists of the amino acid sequence set forth in SEQ ID NO: 2033.

[0188] In certain embodiments, the pseudotyped recombinant lyssavirus particle comprises a heterologous human pegivirus 1 (HPGV1) envelope protein encoded by a nucleic acid sequence that is about 60%, about 65%, about 70%, about 75%, about 80%, about 81%, about 82%, about 83%, about 84%, about 85%, about 86%, about 87%, about 88%, about 89%, about 90%, about 91%, about 92%, about 93%, about 94%, about 95%, about 96%, about 97%, about 98%, about 99% identical to the nucleic acid sequence set forth in SEQ ID NO: 2034. In certain embodiments, the pseudotyped recombinant lyssavirus particle comprises a heterologous HPGV1 envelope protein encoded by a nucleic acid sequence set forth in SEQ ID NO: 2034. In certain embodiments, the pseudotyped recombinant lyssavirus particle comprises a heterologous HPGV1 envelope protein encoded by a nucleic acid sequence consisting of the a nucleic acid sequence set forth in SEQ ID NO: 2034. In certain embodiments, the heterologous HPGV1 envelope protein comprises an amino acid sequence that is about 80%, about 81%, about 82%, about 83%, about 84%, about 85%, about 86%, about 87%, about 88%, about 89%, about 90%, about 91%, about 92%, about 93%, about 94%, about 95%, about 96%, about 97%, about 98%, about 99% identical to the amino acid sequence set forth in SEQ ID NO: 2035. In certain embodiments, the heterologous HPGV1 envelope protein comprises an amino acid sequence set forth in SEQ ID NO: 2035. In certain embodiments, the heterologous HPGV1 envelope protein consists of the amino acid sequence set forth in SEQ ID NO: 2035.

[0189] In certain embodiments, the pseudotyped recombinant lyssavirus particle comprises a heterologous human pegivirus 2 (HPGV2) envelope protein encoded by a nucleic acid sequence that is about 60%, about 65%, about 70%, about 75%, about 80%, about 81%, about 82%, about 83%, about 84%, about 85%, about 86%, about 87%, about 88%, about 89%, about 90%, about 91%, about 92%, about 93%, about 94%, about 95%, about 96%, about 97%, about 98%, about 99% identical to the nucleic acid sequence set forth in SEQ ID NO: 2036. In certain embodiments, the pseudotyped recombinant lyssavirus particle comprises a heterologous HPGV2 envelope protein encoded by a nucleic acid sequence set forth in SEQ ID NO: 2036. In certain embodiments, the pseudotyped recombinant lyssavirus particle comprises a heterologous HPGV2 envelope protein encoded by a nucleic acid sequence consisting of the a nucleic acid sequence set forth in SEQ ID NO: 2036. In certain embodiments, the heterologous HPGV2 envelope protein comprises an amino acid sequence that is about 80%, about 81%, about 82%, about 83%, about 84%, about 85%, about 86%, about 87%, about 88%, about 89%, about 90%, about 91%, about 92%, about 93%, about 94%, about 95%, about 96%, about 97%, about 98%, about 99% identical to the amino acid sequence set forth in SEQ ID NO: 2037. In certain embodiments, the heterologous HPGV2 envelope protein comprises an amino acid sequence set forth in SEQ ID NO: 2037. In certain embodiments, the heterologous HPGV2 envelope protein consists of the amino acid sequence set forth in SEQ ID NO: 2037.

[0190] In certain embodiments, the pseudotyped recombinant lyssavirus particle comprises a heterologous zika virus (ZIKV) envelope protein encoded by a nucleic acid sequence that is about 60%, about 65%, about 70%, about 75%, about 80%, about 81%, about 82%, about 83%, about 84%, about 85%, about 86%, about 87%, about 88%, about 89%, about 90%, about 91%, about 92%, about 93%, about 94%, about 95%, about 96%, about 97%, about 98%, about 99% identical to the nucleic acid sequence set forth in SEQ ID NO: 2038. In certain embodiments, the pseudotyped recombinant lyssavirus particle comprises a heterologous ZIKV envelope protein encoded by a nucleic acid sequence set forth in SEQ ID NO: 2038. In certain embodiments, the pseudotyped recombinant lyssavirus particle comprises a heterologous ZIKV envelope protein encoded by a nucleic acid sequence consisting of the a nucleic acid sequence set forth in SEQ ID NO: 2038. In certain embodiments, the heterologous ZIKV envelope protein comprises an amino acid sequence that is about 80%, about 81%, about 82%, about 83%, about 84%, about 85%, about 86%, about 87%, about 88%, about 89%, about 90%, about 91%, about 92%, about 93%, about 94%, about 95%, about 96%, about 97%, about 98%, about 99% identical to the amino acid sequence set forth in SEQ ID NO: 2039. In certain embodiments, the heterologous ZIKV envelope protein comprises an amino acid sequence set forth in SEQ ID NO: 2039. In certain embodiments, the heterologous ZIKV envelope protein consists of the amino acid sequence set forth in SEQ ID NO: 2039.

[0191] In certain embodiments, the pseudotyped recombinant lyssavirus particle comprises a heterologous marburg virus (MARV) envelope protein encoded by a nucleic acid sequence that is about 60%, about 65%, about 70%, about 75%, about 80%, about 81%, about 82%, about 83%, about 84%, about 85%, about 86%, about 87%, about 88%, about 89%, about 90%, about 91%, about 92%, about 93%, about 94%, about 95%, about 96%, about 97%, about 98%, about 99% identical to the nucleic acid sequence set forth in SEQ ID NO: 2040. In certain embodiments, the pseudotyped recombinant lyssavirus particle comprises a heterologous MARV envelope protein encoded by a nucleic acid sequence set forth in SEQ ID NO: 2040. In certain embodiments, the pseudotyped recombinant lyssavirus particle comprises a heterologous MARV envelope protein encoded by a nucleic acid sequence consisting of the a nucleic acid sequence set forth in SEQ ID NO: 2040. In certain embodiments, the heterologous MARV envelope protein comprises an amino acid sequence that is about 80%, about 81%, about 82%, about 83%, about 84%, about 85%, about 86%, about 87%, about 88%, about 89%, about 90%, about 91%, about 92%, about 93%, about 94%, about 95%, about 96%, about 97%, about 98%, about 99% identical to the amino acid sequence set forth in SEQ ID NO: 2041. In certain embodiments, the heterologous MARV envelope protein comprises an amino acid sequence set forth in SEQ ID NO: 2041. In certain embodiments, the heterologous MARV envelope protein consists of the amino acid sequence set forth in SEQ ID NO: 2041.

[0192] In certain embodiments, the pseudotyped recombinant lyssavirus particle comprises a heterologous nipah virus (NIV) envelope protein encoded by a nucleic acid sequence that is about 60%, about 65%, about 70%, about 75%, about 80%, about 81%, about 82%, about 83%, about 84%, about 85%, about 86%, about 87%, about 88%, about 89%, about 90%, about 91%, about 92%, about 93%, about 94%, about 95%, about 96%, about 97%, about 98%, about 99% identical to the nucleic acid sequence set forth in SEQ ID NO: 2042. In certain embodiments, the pseudotyped recombinant lyssavirus particle comprises a heterologous NIV envelope protein encoded by a nucleic acid sequence set forth in SEQ ID NO: 2042. In certain embodiments, the pseudotyped recombinant lyssavirus particle comprises a heterologous NIV envelope protein encoded by a nucleic acid sequence consisting of the a nucleic acid sequence set forth in SEQ ID NO: 2042.

[0193] In certain embodiments, the heterologous NIV envelope protein comprises an amino acid sequence that is about 80%, about 81%, about 82%, about 83%, about 84%, about 85%, about 86%, about 87%, about 88%, about 89%, about 90%, about 91%, about 92%, about 93%, about 94%, about 95%, about 96%, about 97%, about 98%, about 99% identical to the amino acid sequence set forth in SEQ ID NO: 2043. In certain embodiments, the heterologous NIV envelope protein comprises an amino acid sequence set forth in SEQ ID NO: 2043. In certain embodiments, the heterologous NIV envelope protein consists of the amino acid sequence set forth in SEQ ID NO: 2043.

[0194] In certain embodiments, the heterologous NIV envelope protein comprises an amino acid sequence that is about 80%, about 81%, about 82%, about 83%, about 84%, about 85%, about 86%, about 87%, about 88%, about 89%, about 90%, about 91%, about 92%, about 93%, about 94%, about 95%, about 96%, about 97%, about 98%, about 99% identical to the amino acid sequence set forth in SEQ ID NO: 2044. In certain embodiments, the heterologous NIV envelope protein comprises an amino acid sequence set forth in SEQ ID NO: 2044. In certain embodiments, the heterologous NIV envelope protein consists of the amino acid sequence set forth in SEQ ID NO: 2044.

[0195] In certain embodiments, the heterologous NIV envelope protein comprises an amino acid sequence that is about 80%, about 81%, about 82%, about 83%, about 84%, about 85%, about 86%, about 87%, about 88%, about 89%, about 90%, about 91%, about 92%, about 93%, about 94%, about 95%, about 96%, about 97%, about 98%, about 99% identical to the amino acid sequence set forth in SEQ ID NO: 2045. In certain embodiments, the heterologous NIV envelope protein comprises an amino acid sequence set forth in SEQ ID NO: 2045. In certain embodiments, the heterologous NIV envelope protein consists of the amino acid sequence set forth in SEQ ID NO: 2045.

### C. Therapeutic Transgenes

[0196] In certain embodiments, a recombinant lyssavirus genome (e.g., a recombinant rabies virus genome) of the present disclosure encodes a nucleic acid comprising a therapeutic transgene. As used herein, the term “therapeutic” refers to treatment and/or prophylaxis. As used herein, the term “therapeutic transgene” refers to a transgene that encodes a transgene product that is capable of effecting treatment and/or prophylaxis to a subject in need. In certain embodiments, the therapeutic effect is accomplished by suppression, remission, or eradication of a disease state suffered by the subject. The therapeutic transgene may encode any therapeutic agent that is capable of effecting treatment and/or prophylaxis in a subject in need, resulting in suppression, remission, or eradication of a disease state in the subject.

[0197] In certain embodiments, the nucleic acid encoding the therapeutic transgene is greater than: about 300 bp, about 400 bp, about 500 bp, about 600 bp, about 700 bp, about 800 bp, about 900 bp, about 1,000 bp, about 1,100 bp, about 1,200 bp, about 1,300 bp, about 1,400 bp, about 1,500 bp, about 1,600 bp, about 1,700 bp, about 1,800 bp, about 1,900 bp, about 2,000 bp, about 2,100 bp, about 2,200 bp, about 2,300 bp, about 2,400 bp, about 2,500 bp, about 2,600 bp, about 2,700 bp, about 2,800 bp, about 2,900 bp, or about 3,000 bp.

[0198] In certain embodiments, the nucleic acid encoding the therapeutic transgene is greater than about 300 bp (e.g., the therapeutic transgene is about 350 bp, about 400 bp, about 450 bp, about 500 bp, about 550 bp, about 600 bp, or about 650 bp). In certain embodiments, the nucleic acid encoding the therapeutic transgene is greater than about 650 bp (e.g., the therapeutic transgene is about 700 bp, about 750 bp, about 800 bp, about 850 bp, about 900 bp, about 950 bp, or about 1,000 bp). In certain embodiments, the nucleic acid encoding the therapeutic transgene is greater than about 1,000 bp (e.g., the therapeutic transgene is about 1,500 bp, about 2,000 bp, about 2,500 bp, or about 3,000 bp). In certain embodiments, the nucleic acid encoding the therapeutic transgene is greater than about 3,000 bp (e.g., the therapeutic transgene is about 3,500 bp, about 4,000 bp, or about 4,500 bp).

[0199] In certain embodiments, the nucleic acid encoding the therapeutic transgene is greater than about 4,500 bp (e.g., the therapeutic transgene is about 5,000 bp, about 5,500 bp, about 6,000 bp, about 6,500 bp, about 7,000 bp, about 7,500 bp, about 8,000 bp, or about 8,500 bp).

[0200] In certain embodiments, the nucleic acid encoding the therapeutic transgene is greater than about 8,500 bp (e.g., the therapeutic transgene is about 9,000 bp, about 9,500 bp, or about 10,000 bp).

[0201] In certain embodiments, the nucleic acid encoding the therapeutic transgene is greater than about 10,000 bp (e.g., the therapeutic transgene is about 10,500 bp, about 11,000 bp, about 11,500 bp, about 12,000 bp, about 12,500 bp, about 13,000 bp, about 13,500 bp, about 14,000 bp, about 14,500 bp, or about 15,000 bp).

[0202] In certain embodiments, the nucleic acid encoding the therapeutic transgene is between about 4,000 bp and about 6,000 bp (e.g., the therapeutic transgene is about 4,000 bp, about 4,500 bp, about 5,000 bp, about 5,500 bp, or about 6,000 bp).

[0203] In certain embodiments, the therapeutic transgene encodes a therapeutic nucleic acid. The therapeutic transgene may encode any therapeutic nucleic acid known in the art, for example, without limitation, any antisense RNA (single-stranded RNA), any small interfering RNA (double-stranded RNA), any RNA aptamer, and/or any messenger RNA (mRNA). For example, the therapeutic transgene can encode, without limitation, a miRNA, a miRNA mimic, a siRNA, a shRNA, a gRNA, a long noncoding RNA, an enhancer RNA, a RNA aptazyme, a RNA aptamer, an antagomiR, and/or a synthetic RNA. In certain embodiments, a therapeutic nucleic acid may be a RNA binding site, e.g., a miRNA binding site. Various other types of therapeutic nucleic acids are known to those of ordinary skill in the art.

[0204] In certain embodiments, the therapeutic transgene encodes a therapeutic polypeptide. The therapeutic transgene may encode any therapeutic polypeptide known in the art, for example, without limitation, a therapeutic polypeptide that can replace a deficient or abnormal protein; a therapeutic polypeptide that can augment an existing pathway; a therapeutic polypeptide that can provide a novel function or activity (e.g., a novel function or activity beneficial to a subject suffering from the lack thereof); a therapeutic polypeptide that interferes with a molecule or an organism (e.g., an organism that is different to the organism that hosts the target cell); and/or a therapeutic polypeptide that delivers other compounds or proteins (e.g., a radionuclide, a cytotoxic drug, and/or an effector protein). For example, the therapeutic transgene can encode, without limitation, a nucleic acid editing protein (e.g., an adenine or cytidine base editor) or system, an antibody or antibody-based drug, an anticoagulant, a blood factor, a bone morphogenetic protein, an engineered protein scaffold, an enzyme, an Fc fusion protein, a growth factor, a hormone, an interferon, an interleukin, and/or a thrombolytic. Various other types of therapeutic polypeptides are known to those of ordinary skill in the art.

[0205] In certain embodiments, the therapeutic transgene encodes a nucleic acid editing system or components thereof. In some embodiments the therapeutic transgene encodes a protein comprising a nucleic acid binding protein (e.g., a zinc finger, a TALE, or a nucleic acid programmable nucleic acid binding protein, such as Cas9). In some embodiments, the nucleic acid editing system component is a nucleic acid programmable nucleic acid binding protein (e.g., Cas9). In some embodiments, the nucleic acid editing system component is a guide RNA (gRNA).

[0206] In some embodiments, the therapeutic transgene encodes a CRISPR system. In some embodiments, the CRISPR system comprises a nucleobase editor comprising a polynucleotide programmable nucleotide binding domain and a nucleobase editing domain. In some embodiments, the nucleobase editing domain is an adenosine deaminase, cytidine deaminase, cytosine deaminase, or a functional variant thereof (e.g., a functional variant capable of deaminating a nucleobase in a nucleic acid molecule such as DNA or RNA). In some embodiments, the nucleobase editing domain is an adenosine deaminase. In some embodiments, the adenosine deaminase is ABE7.10. In some embodiments, the polynucleotide programmable nucleotide binding domain is a Cas9 polypeptide, a Cas12 polypeptide, or a functional variant thereof. In some embodiments, the CRISPR system further comprises a guide RNA (gRNA) or a nucleic acid encoding a gRNA.

[0207] In some embodiments the therapeutic transgene encodes a nucleobase modifying protein (e.g., a base editor protein). In some embodiments the therapeutic transgene encodes an adenosine base editor (e.g., ABE7.10). In some embodiments the therapeutic transgene encodes a cytidine base editor. In some embodiments the therapeutic transgene encodes a cytosine base editor capable of deaminating a cytosine in DNA or RNA.

[0208] In certain embodiments, the therapeutic transgene encodes a nucleic acid editing system, e.g., a base editor system further described herein.

[0209] It will be readily apparent to those of ordinary skill in the art that a recombinant lyssavirus genome (e.g., a recombinant rabies virus genome) of the present disclosure described herein encodes a nucleic acid comprising a therapeutic transgene, wherein the therapeutic transgene encodes a therapeutic polypeptide and/or a therapeutic nucleic acid, e.g., in certain embodiments, the therapeutic transgene encodes a combination of the therapeutic polypeptide and the therapeutic nucleic acid. In certain embodiments, the therapeutic transgene encodes one or more therapeutic polypeptides. In certain embodiments, the therapeutic transgene encodes one or more therapeutic nucleic acids. In certain embodiments, the therapeutic transgene encodes a combination of one or more therapeutic polypeptides and one or more therapeutic nucleic acids. Delivery of a combination of a therapeutic polypeptide and therapeutic nucleic acid into a target cell may serve various purposes known to those of ordinary skill in the art. In certain embodiments, a therapeutic polypeptide may be delivered to a target cell, wherein the delivery is detargeted to certain other cell types. For example, a therapeutic transgene can encode a therapeutic polypeptide and/or therapeutic nucleic acid, and also comprise a miRNA binding site. The miRNA binding site may function for cell type detargeting. For example, miRNA122a, which is expressed exclusively in liver, can be employed for hepatocyte detargeting. See, e.g., Dhungel et al., Molecules (2018) 23(7): 1500.

[0210] In certain embodiments, the therapeutic transgene further encodes one or more reporter sequences. Reporter sequences when expressed in the target cell, produces a directly or an indirectly detectable signal. Examples of suitable reporter sequences include, without limitation, sequences encoding for fluorescent proteins (e.g., GFP, RFP, YFP), alkaline phosphatase, thymidine kinase, chloramphenicol acetyltransferase (CAT), luciferase, p-galactosidase (LacZ), and p-lactamase. Sequences encoding for cell surface membrane-bound proteins may also be suitable as reporter sequences, for example, membrane-bound proteins to which high affinity antibodies bind, e.g., influenza hemagglutinin protein (HA), CD2, CD4, CD8, and others known to those of ordinary skill in the art, including, e.g., membrane-bound proteins tagged with an antigen domain (e.g., an HA tag, a FLAG tag, a Myc tag, a polyhistidine tag).

[0211] In certain embodiments, the therapeutic transgene does not encode a reporter gene and/or a selectable marker. In certain embodiments, the therapeutic transgene does not encode a fluorescent reporter protein (e.g., GFP, YFP, RFP, tdTomato). In certain embodiments, the therapeutic transgene does not encode p-galactosidase (LacZ). In certain embodiments, the therapeutic transgene does not encode chloramphenicol acetyltransferase (CAT).

[0212] In certain embodiments, the therapeutic transgene doe not encode a polymerase (e.g., DNA polymerase, DNA-directed RNA polymerase, RNA-directed DNA polumerase (RT), telomerase).

[0213] In certain embodiments, the therapeutic transgene does not encode a site-specific recombinase (e.g., Cre, FLP, Hin, or Tre recombinases).

[0214] In certain embodiments, the therapeutic transgene does not encode a viral antigen.

[0215] In certain embodiments, the therapeutic transgene does not encode a pro-apoptotic protein (e.g., cytochrome c).

[0216] In certain embodiments, the therapeutic transgene does not encode an an immunoglobulin (e.g., an immunoglobulin heavy and/or light chain.

[0217] In certain embodiments, a recombinant lyssavirus genome (e.g., a recombinant rabies virus genome) of the present disclosure comprises a transcriptional regulatory element operably linked to the nucleic acid encoding a transgene. The transcriptional regulatory element is capable of controlling the expression of the transgene (e.g., expression of the encoded therapeutic polypeptide and/or nucleic acid) that is operably linked thereto. In certain embodiments, the transcriptional regulatory element comprises a transcription initiation signal. The transcription initiation signal can be endogenous or exogenous to the lyssavirus (e.g., a rabies virus). In certain embodiments, the transcription initiation signal is a synthetic transcription initiation signal. In certain embodiments, the nucleic acid encoding a transgene is further operably linked to a transcription termination polyadenylation signal. The transcription termination polyadenylation signal can be endogenous or exogenous to the lyssavirus (e.g., a rabies virus). In certain embodiments, the transcription termination polyadenylation signal is a synthetic transcription termination polyadenylation signal. Examples of suitable transcription initiation signals and transcriptional termination polyadenylaton signals are known to those of ordinary skill in the art, and are described in, e.g., Albertini et al., Adv. Virus. Res. (2011) 79: 1-22; Ogino and Green, Viruses (2019) 11(6): 504; and Ogino and Green, Front. Microbiol. (2019) 10: 1490, the disclosures of which are herein incorporated by reference in their entireties.

[0218] A recombinant lyssavirus genome (e.g., a recombinant rabies virus genome) of the present disclosure comprising a nucleic acid comprising a therapeutic transgene may further comprise any elements known to those of ordinary skill in the art that aid and/or enhance in the expression of the therapeutic transgene.

[0219] Recombinant lyssavirus genomes (e.g., rabies virus genomes) of the present disclosure are incorporated into a pseudotyped recombinant lyssavirus particle by methods described herein.

### D. Nucleobase Editors

[0220] In certain exemplary embodiments, therapeutic transgenes useful in the methods and compositions described herein are nucleobase editors that edit, modify or alter a target nucleotide sequence of a polynucleotide. Nucleobase editors described herein typically include a polynucleotide programmable nucleotide binding domain and a nucleobase editing domain (e.g., adenosine deaminase or cytidine deaminase). A polynucleotide programmable nucleotide binding domain, when in conjunction with a bound guide polynucleotide (e.g., gRNA), can specifically bind to a target polynucleotide sequence and thereby localize the base editor to the target nucleic acid sequence desired to be edited.

### Polynucleotide Programmable Nucleotide Binding Domain

[0221] Polynucleotide programmable nucleotide binding domains bind polynucleotides (e.g., RNA, DNA). A polynucleotide programmable nucleotide binding domain of a base editor can itself comprise one or more domains (e.g., one or more nuclease domains). In some embodiments, the nuclease domain of a polynucleotide programmable nucleotide binding domain can comprise an endonuclease or an exonuclease. An endonuclease can cleave a single strand of a double-stranded nucleic acid or both strands of a double-stranded nucleic acid molecule. In some embodiments, a nuclease domain of a polynucleotide programmable nucleotide binding domain can cut zero, one, or two strands of a target polynucleotide.

[0222] Non-limiting examples of a polynucleotide programmable nucleotide binding domain which can be incorporated into a base editor include a CRISPR protein-derived domain, a restriction nuclease, a meganuclease, transcription activator-like effector protein (TALE, including a TALE nuclease, TALEN), and a zinc finger protein (ZF, including a ZF nuclease, ZFN). In some embodiments, a base editor comprises a polynucleotide programmable nucleotide binding domain comprising a natural or modified protein or portion thereof which via a bound guide nucleic acid is capable of binding to a nucleic acid sequence during CRISPR (i.e., Clustered Regularly Interspaced Short Palindromic Repeats)-mediated modification of a nucleic acid. Such a protein is referred to herein as a “CRISPR protein.” Accordingly, disclosed herein is a base editor comprising a polynucleotide programmable nucleotide binding domain comprising all or a portion of a CRISPR protein (i.e. a base editor comprising as a domain all or a portion of a CRISPR protein, also referred to as a “CRISPR protein-derived domain” of the base editor). A CRISPR protein-derived domain incorporated into a base editor can be modified compared to a wild-type or natural version of the CRISPR protein. For example, as described below a CRISPR protein-derived domain can comprise one or more mutations, insertions, deletions, rearrangements and/or recombinations relative to a wild-type or natural version of the CRISPR protein.

[0223] Cas proteins that can be used herein include class 1 and class 2. Non-limiting examples of Cas proteins include Cas1, Cas1B, Cas2, Cas3, Cas4, Cas5, Cas5d, Cas5t, Cas5h, Cas5a, Cas6, Cas7, Cas8, Cas9 (also known as Csn1 or Csx12), Cas10, Csy1, Csy2, Csy3, Csy4, Cse1, Cse2, Cse3, Cse4, Cse5e, Csc1, Csc2, Csa5, Csn1, Csn2, Csm1, Csm2, Csm3, Csm4, Csm5, Csm6, Cmr1, Cmr3, Cmr4, Cmr5, Cmr6, Csb1, Csb2, Csb3, Csx17, Csx14, Csx10, Csx16, CsaX, Csx3, Csx1, Csx1S, Csf1, Csf2, CsO, Csf4, Csd1, Csd2, Cst1, Cst2, Csh1, Csh2, Csa1, Csa2, Csa3, Csa4, Csa5, Cas12a/Cpf1, Cas12b/C2c1 (e.g., SEQ ID NO: 258), Cas12c/C2c3, Cas12d/CasY, Cas12e/CasX, Cas12g, Cas12h, Cas12i, and Cas12j/CasCΦ, CARF, DinG, homologues thereof, or modified versions thereof. A CRISPR enzyme can direct cleavage of one or both strands at a target sequence, such as within a target sequence and/or within a complement of a target sequence. For example, a CRISPR enzyme can direct cleavage of one or both strands within about 1, 2, 3, 4, 5, 6, 7, 8, 9, 10, 15, 20, 25, 50, 100, 200, 500, or more base pairs from the first or last nucleotide of a target sequence.

[0224] A vector that encodes a CRISPR enzyme that is mutated to with respect, to a corresponding wild-type enzyme such that the mutated CRISPR enzyme lacks the ability to cleave one or both strands of a target polynucleotide containing a target sequence can be used. A Cas protein (e.g., Cas9, Cas12) or a Cas domain (e.g., Cas9, Cas12) can refer to a polypeptide or domain with at least or at least about 50%, 60%, 70%, 80%, 90%, 91%, 92%, 93%, 94%, 95%, 96%, 97%, 98%, 99%, or 100% sequence identity and/or sequence homology to a wild-type exemplary Cas polypeptide or Cas domain. Cas (e.g., Cas9, Cas12) can refer to the wild-type or a modified form of the Cas protein that can comprise an amino acid change such as a deletion, insertion, substitution, variant, mutation, fusion, chimera, or any combination thereof. In some embodiments, a CRISPR protein-derived domain of a base editor can include all or a portion of Cas9 from Corynebacterium ulcerans (NCBI Refs: NC_015683.1, NC_017317.1); Corynebacterium diphtheria (NCBI Refs: NC_016782.1, NC_016786.1); Spiroplasma syrphidicola (NCBI Ref: NC_021284.1); Prevotella intermedia (NCBI Ref: NC_017861.1); Spiroplasma taiwanense (NCBI Ref: NC_021846.1); Streptococcus iniae (NCBI Ref: NC_021314.1); Belliella baltica (NCBI Ref: NC_018010.1); Psychroflexus torquis (NCBI Ref: NC_018721.1); Streptococcus thermophilus (NCBI Ref: YP_820832.1); Listeria innocua (NCBI Ref: NP_472073.1); Campylobacter jejuni (NCBI Ref: YP_002344900.1); Neisseria meningitidis (NCBI Ref: YP_002342100.1), Streptococcus pyogenes, or Staphylococcus aureus.

[0225] Cas9 nuclease sequences and structures are well known to those of skill in the art (See, e.g., “Complete genome sequence of an MI strain of Streptococcus pyogenes.” Ferretti et al., Proc. Natl. Acad. Sci. U.S.A. 98:4658-4663(2001); “CRISPR RNA maturation by trans-encoded small RNA and host factor RNase III.” Deltcheva E., et al., Nature 471:602-607(2011); and “A programmable dual-RNA-guided DNA endonuclease in adaptive bacterial immunity.” Jinek M., et al., Science 337:816-821(2012), the entire contents of each of which are incorporated herein by reference). Cas9 orthologs have been described in various species, including, but not limited to, S. pyogenes and S. thermophilus. Additional suitable Cas9 nucleases and sequences will be apparent to those of skill in the art based on this disclosure, and such Cas9 nucleases and sequences include Cas9 sequences from the organisms and loci disclosed in Chylinski, Rhun, and Charpentier, “The tracrRNA and Cas9 families of type II CRISPR-Cas immunity systems” (2013) RNA Biology 10:5, 726-737; the entire contents of which are incorporated herein by reference.

[0226] High Fidelity Cas9 Domains

[0227] Some aspects of the disclosure provide high fidelity Cas9 domains. High fidelity Cas9 domains are known in the art and described, for example, in Kleinstiver, B. P., et al. “High-fidelity CRISPR-Cas9 nucleases with no detectable genome-wide off-target effects.” Nature 529, 490-495 (2016); and Slaymaker, I. M., et al. “Rationally engineered Cas9 nucleases with improved specificity.” Science 351, 84-88 (2015); the entire contents of each of which are incorporated herein by reference. An Exemplary high fidelity Cas9 domain is provided in the Sequence Listing as SEQ ID NO: 1423. In some embodiments, high fidelity Cas9 domains are engineered Cas9 domains comprising one or more mutations that decrease electrostatic interactions between the Cas9 domain and the sugar-phosphate backbone of a DNA, relative to a corresponding wild-type Cas9 domain. High fidelity Cas9 domains that have decreased electrostatic interactions with the sugar-phosphate backbone of DNA have less off-target effects. In some embodiments, the Cas9 domain (e.g., a wild type Cas9 domain (SEQ ID NOs: 223 and 233)) comprises one or more mutations that decrease the association between the Cas9 domain and the sugar-phosphate backbone of a DNA. In some embodiments, a Cas9 domain comprises one or more mutations that decreases the association between the Cas9 domain and the sugar-phosphate backbone of DNA by at least 1%, at least 2%, at least 3%, at least 4%, at least 5%, at least 10%, at least 15%, at least 20%, at least 25%, at least 30%, at least 35%, at least 40%, at least 45%, at least 50%, at least 55%, at least 60%, at least 65%, or at least 70%.

[0228] In some embodiments, any of the Cas9 fusion proteins provided herein comprise one or more of a D10A, N497X, a R661X, a Q695X, and/or a Q926X mutation, or a corresponding mutation in any of the amino acid sequences provided herein, wherein X is any amino acid. In some embodiments, the high fidelity Cas9 enzyme is SpCas9(K855A), eSpCas9(1.1), SpCas9-HF1, or hyper accurate Cas9 variant (HypaCas9). In some embodiments, the modified Cas9 eSpCas9(1.1) contains alanine substitutions that weaken the interactions between the HNH/RuvC groove and the non-target DNA strand, preventing strand separation and cutting at off-target sites. Similarly, SpCas9-HF1 lowers off-target editing through alanine substitutions that disrupt Cas9's interactions with the DNA phosphate backbone. HypaCas9 contains mutations (SpCas9 N692A/M694A/Q695A/H698A) in the REC3 domain that increase Cas9 proofreading and target discrimination. All three high fidelity enzymes generate less off-target editing than wildtype Cas9.

[0229] Cas9 Domains with Reduced Exclusivity

[0230] Typically, Cas9 proteins, such as Cas9 from S. pyogenes (spCas9), require a “protospacer adjacent motif (PAM)” or PAM-like motif, which is a 2-6 base pair DNA sequence immediately following the DNA sequence targeted by the Cas9 nuclease in the CRISPR bacterial adaptive immune system. The presence of an NGG PAM sequence is required to bind a particular nucleic acid region, where the “N” in “NGG” is adenosine (A), thymidine (T), or cytosine (C), and the G is guanosine. This may limit the ability to edit desired bases within a genome. In some embodiments, the base editing fusion proteins provided herein may need to be placed at a precise location, for example a region comprising a target base that is upstream of the PAM. See e.g., Komor, A. C., et al., “Programmable editing of a target base in genomic DNA without double-stranded DNA cleavage” Nature 533, 420-424 (2016), the entire contents of which are hereby incorporated by reference. Exemplary polypeptide sequences for spCas9 proteins capable of binding a PAM sequence are provided in the Sequence Listing as SEQ ID NOs: 223, 234, and 1304-1307. Accordingly, in some embodiments, any of the fusion proteins provided herein may contain a Cas9 domain that is capable of binding a nucleotide sequence that does not contain a canonical (e.g., NGG) PAM sequence. Cas9 domains that bind to non-canonical PAM sequences have been described in the art and would be apparent to the skilled artisan. For example, Cas9 domains that bind non-canonical PAM sequences have been described in Kleinstiver, B. P., et al., “Engineered CRISPR-Cas9 nucleases with altered PAM specificities” Nature 523, 481-485 (2015); and Kleinstiver, B. P., et al., “Broadening the targeting range of Staphylococcus aureus CRISPR-Cas9 by modifying PAM recognition” Nature Biotechnology 33, 1293-1298 (2015); the entire contents of each are hereby incorporated by reference.

[0231] Nickases

[0232] In some embodiments, the polynucleotide programmable nucleotide binding domain can comprise a nickase domain. Herein the term “nickase” refers to a polynucleotide programmable nucleotide binding domain comprising a nuclease domain that is capable of cleaving only one strand of the two strands in a duplexed nucleic acid molecule (e.g., DNA). In some embodiments, a nickase can be derived from a fully catalytically active (e.g., natural) form of a polynucleotide programmable nucleotide binding domain by introducing one or more mutations into the active polynucleotide programmable nucleotide binding domain. For example, where a polynucleotide programmable nucleotide binding domain comprises a nickase domain derived from Cas9, the Cas9-derived nickase domain can include a D10A mutation and a histidine at position 840. In such embodiments, the residue H840 retains catalytic activity and can thereby cleave a single strand of the nucleic acid duplex. In another example, a Cas9-derived nickase domain can comprise an H840A mutation, while the amino acid residue at position 10 remains a D. In some embodiments, a nickase can be derived from a fully catalytically active (e.g., natural) form of a polynucleotide programmable nucleotide binding domain by removing all or a portion of a nuclease domain that is not required for the nickase activity. For example, where a polynucleotide programmable nucleotide binding domain comprises a nickase domain derived from Cas9, the Cas9-derived nickase domain can comprise a deletion of all or a portion of the RuvC domain or the HNH domain.

[0233] In some embodiments, wild-type Cas9 corresponds to, or comprises the following amino acid sequence:

(SEQ ID NO: 223)
[sequence omitted]
(single underline: HNH domain; double underline:
RuvC domain).

[0234] In some embodiments, the strand of a nucleic acid duplex target polynucleotide sequence that is cleaved by a base editor comprising a nickase domain (e.g., Cas9-derived nickase domain, Cas12-derived nickase domain) is the strand that is not edited by the base editor (i.e., the strand that is cleaved by the base editor is opposite to a strand comprising a base to be edited). In other embodiments, a base editor comprising a nickase domain (e.g., Cas9-derived nickase domain, Cas12-derived nickase domain) can cleave the strand of a DNA molecule which is being targeted for editing. In such embodiments, the non-targeted strand is not cleaved.

In some embodiments, a Cas9 nuclease has an inactive (e.g., an inactivated) DNA cleavage domain, that is, the Cas9 is a nickase, referred to as an “nCas9” protein (for “nickase” Cas9). The Cas9 nickase may be a Cas9 protein that is capable of cleaving only one strand of a duplexed nucleic acid molecule (e.g., a duplexed DNA molecule). In some embodiments the Cas9 nickase cleaves the target strand of a duplexed nucleic acid molecule, meaning that the Cas9 nickase cleaves the strand that is base paired to (complementary to) a gRNA (e.g., an sgRNA) that is bound to the Cas9. In some embodiments, a Cas9 nickase comprises a D10A mutation and has a histidine at position 840. In some embodiments the Cas9 nickase cleaves the non-target, non-base-edited strand of a duplexed nucleic acid molecule, meaning that the Cas9 nickase cleaves the strand that is not base paired to a gRNA (e.g., an sgRNA) that is bound to the Cas9. In some embodiments, a Cas9 nickase comprises an H840A mutation and has an aspartic acid residue at position 10, or a corresponding mutation. In some embodiments the Cas9 nickase comprises an amino acid sequence that is at least 60%, at least 65%, at least 70%, at least 75%, at least 80%, at least 85%, at least 90%, at least 95%, at least 96%, at least 97%, at least 98%, at least 99%, or at least 99.5% identical to any one of the Cas9 nickases provided herein. Additional suitable Cas9 nickases will be apparent to those of skill in the art based on this disclosure and knowledge in the field, and are within the scope of this disclosure.

[0235] The amino acid sequence of an exemplary catalytically Cas9 nickase (nCas9) is as follows:

(SEQ ID NO: 234)
MDKKYSIGLAIGTNSVGWAVITDEYKVPSKKFKVLGNTDRHSIKKNLIGAL
LFDSGETAEATRLKRTARRRYTRRKNRICYLQEIFSNEMAKVDDSFFHRLE
ESFLVEEDKKHERHPIFGNIVDEVAYHEKYPTIYHLRKKLVDSTDKADLRL
IYLALAHMIKFRGHFLIEGDLNPDNSDVDKLFIQLVQTYNQLFEENPINAS
GVDAKAILSARLSKSRRLENLIAQLPGEKKNGLFGNLIALSLGLTPNFKSN
FDLAEDAKLQLSKDTYDDDLDNLLAQIGDQYADLFLAAKNLSDAILLSDIL
RVNTEITKAPLSASMIKRYDEHHQDLTLLKALVRQQLPEKYKEIFFDQSKN
GYAGYIDGGASQEEFYKFIKPILEKMDGTEELLVKLNREDLLRKQRTFDNG
SIPHQIHLGELHAILRRQEDFYPFLKDNREKIEKILTFRIPYYVGPLARGN
SRFAWMTRKSEETITPWNFEEVVDKGASAQSFIERMTNFDKNLPNEKVLPK
HSLLYEYFTVYNELTKVKYVTEGMRKPAFLSGEQKKAIVDLLFKTNRKVTV
KQLKEDYFKKIECFDSVEISGVEDRFNASLGTYHDLLKIIKDKDFLDNEEN
EDILEDIVLTLTLFEDREMIEERLKTYAHLFDDKVMKQLKRRRYTGWGRLS
RKLINGIRDKQSGKTILDFLKSDGFANRNFMQLIHDDSLTFKEDIQKAQVS
GQGDSLHEHIANLAGSPAIKKGILQTVKVVDELVKVMGRHKPENIVIEMAR
ENQTTQKGQKNSRERMKRIEEGIKELGSQILKEHPVENTQLQNEKLYLYYL
QNGRDMYVDQELDINRLSDYDVDHIVPQSFLKDDSIDNKVLTRSDKNRGKS
DNVPSEEVVKKMKNYWRQLLNAKLITQRKFDNLTKAERGGLSELDKAGFIK
RQLVETRQITKHVAQILDSRMNTKYDENDKLIREVKVITLKSKLVSDFRKD
FQFYKVREINNYHHAHDAYLNAVVGTALIKKYPKLESEFVYGDYKVYDVRK
MIAKSEQEIGKATAKYFFYSNIMNFFKTEITLANGEIRKRPLIETNGETGE
IVWDKGRDFATVRKVLSMPQVNIVKKTEVQTGGFSKESILPKRNSDKLIAR
KKDWDPKKYGGFDSPTVAYSVLVVAKVEKGKSKKLKSVKELLGITIMERSS
FEKNPIDFLEAKGYKEVKKDLIIKLPKYSLFELENGRKRMLASAGELQKGN
ELALPSKYVNFLYLASHYEKLKGSPEDNEQKQLFVEQHKHYLDEIIEQISE
FSKRVILADANLDKVLSAYNKHRDKPIREQAENIIHLFTLTNLGAPAAFKY
FDTTIDRKRYTSTKEVLDATLIHQSITGLYETRIDLSQLGGD

[0236] The Cas9 nuclease has two functional endonuclease domains: RuvC and HNH. Cas9 undergoes a conformational change upon target binding that positions the nuclease domains to cleave opposite strands of the target DNA. The end result of Cas9-mediated DNA cleavage is a double-strand break (DSB) within the target DNA (˜3-4 nucleotides upstream of the PAM sequence). The resulting DSB is then repaired by one of two general repair pathways: (1) the efficient but error-prone non-homologous end joining (NHEJ) pathway; or (2) the less efficient but high-fidelity homology directed repair (HDR) pathway.

[0237] The “efficiency” of non-homologous end joining (NHEJ) and/or homology directed repair (HDR) can be calculated by any convenient method. For example, in some embodiments, efficiency can be expressed in terms of percentage of successful HDR. For example, a surveyor nuclease assay can be used to generate cleavage products and the ratio of products to substrate can be used to calculate the percentage. For example, a surveyor nuclease enzyme can be used that directly cleaves DNA containing a newly integrated restriction sequence as the result of successful HDR. More cleaved substrate indicates a greater percent HDR (a greater efficiency of HDR). As an illustrative example, a fraction (percentage) of HDR can be calculated using the following equation [(cleavage products)/(substrate plus cleavage products)] (e.g., (b+c)/(a+b+c), where “a” is the band intensity of DNA substrate and “b” and “c” are the cleavage products).

[0238] In some embodiments, efficiency can be expressed in terms of percentage of successful NHEJ. For example, a T7 endonuclease I assay can be used to generate cleavage products and the ratio of products to substrate can be used to calculate the percentage NHEJ. T7 endonuclease I cleaves mismatched heteroduplex DNA which arises from hybridization of wild-type and mutant DNA strands (NHEJ generates small random insertions or deletions (indels) at the site of the original break). More cleavage indicates a greater percent NHEJ (a greater efficiency of NHEJ). As an illustrative example, a fraction (percentage) of NHEJ can be calculated using the following equation: (1−(1−(b+c)/(a+b+c))^{1/2})×100, where “a” is the band intensity of DNA substrate and “b” and “c” are the cleavage products (Ran et. al., Cell. 2013 Sep. 12; 154(6):1380-9; and Ran et al., Nat Protoc. 2013 November; 8(11): 2281-2308).

[0239] The NHEJ repair pathway is the most active repair mechanism, and it frequently causes small nucleotide insertions or deletions (indels) at the DSB site. The randomness of NHEJ-mediated DSB repair has important practical implications, because a population of cells expressing Cas9 and a gRNA or a guide polynucleotide can result in a diverse array of mutations. In most embodiments, NHEJ gives rise to small indels in the target DNA that result in amino acid deletions, insertions, or frameshift mutations leading to premature stop codons within the open reading frame (ORF) of the targeted gene. The ideal end result is a loss-of-function mutation within the targeted gene.

[0240] While NHEJ-mediated DSB repair often disrupts the open reading frame of the gene, homology directed repair (HDR) can be used to generate specific nucleotide changes ranging from a single nucleotide change to large insertions like the addition of a fluorophore or tag.

[0241] In order to utilize HDR for nucleic acid editing, a DNA repair template containing the desired sequence can be delivered into the cell type of interest with the gRNA(s) and Cas9 or Cas9 nickase. The repair template can contain the desired edit as well as additional homologous sequence immediately upstream and downstream of the target (termed left & right homology arms). The length of each homology arm can be dependent on the size of the change being introduced, with larger insertions requiring longer homology arms. The repair template can be a single-stranded oligonucleotide, double-stranded oligonucleotide, or a double-stranded DNA plasmid. The efficiency of HDR is generally low (<10% of modified alleles) even in cells that express Cas9, gRNA and an exogenous repair template. The efficiency of HDR can be enhanced by synchronizing the cells, since HDR takes place during the S and G2 phases of the cell cycle. Chemically or genetically inhibiting genes involved in NHEJ can also increase HDR frequency.

[0242] In some embodiments, Cas9 is a modified Cas9. A given gRNA targeting sequence can have additional sites throughout the genome where partial homology exists. These sites are called off-targets and need to be considered when designing a gRNA. In addition to optimizing gRNA design, CRISPR specificity can also be increased through modifications to Cas9. Cas9 generates double-strand breaks (DSBs) through the combined activity of two nuclease domains, RuvC and HNH. Cas9 nickase, a D10A mutant of SpCas9, retains one nuclease domain and generates a DNA nick rather than a DSB. The nickase system can also be combined with HDR-mediated nucleic acid editing for specific gene edits.

### Catalytically Dead Nucleases

[0243] Also provided herein are base editors comprising a polynucleotide programmable nucleotide binding domain which is catalytically dead (i.e., incapable of cleaving a target polynucleotide sequence). Herein the terms “catalytically dead” and “nuclease dead” are used interchangeably to refer to a polynucleotide programmable nucleotide binding domain which has one or more mutations and/or deletions resulting in its inability to cleave a strand of a nucleic acid. In some embodiments, a catalytically dead polynucleotide programmable nucleotide binding domain base editor can lack nuclease activity as a result of specific point mutations in one or more nuclease domains. For example, in the case of a base editor comprising a Cas9 domain, the Cas9 can comprise both a D10A mutation and an H840A mutation. Such mutations inactivate both nuclease domains, thereby resulting in the loss of nuclease activity. In other embodiments, a catalytically dead polynucleotide programmable nucleotide binding domain can comprise one or more deletions of all or a portion of a catalytic domain (e.g., RuvC1 and/or HNH domains). In further embodiments, a catalytically dead polynucleotide programmable nucleotide binding domain comprises a point mutation (e.g., D10A or H840A) as well as a deletion of all or a portion of a nuclease domain. dCas9 domains are known in the art and described, for example, in Qi et al., “Repurposing CRISPR as an RNA-guided platform for sequence-specific control of gene expression.” Cell. 2013; 152(5):1173-83, the entire contents of which are incorporated herein by reference.

[0244] Additional suitable nuclease-inactive dCas9 domains will be apparent to those of skill in the art based on this disclosure and knowledge in the field, and are within the scope of this disclosure. Such additional exemplary suitable nuclease-inactive Cas9 domains include, but are not limited to, D10A/H840A, D10A/D839A/H840A, and D10A/D839A/H840A/N863A mutant domains (See, e.g., Prashant et al., CAS9 transcriptional activators for target specificity screening and paired nickases for cooperative genome engineering. Nature Biotechnology. 2013; 31(9): 833-838, the entire contents of which are incorporated herein by reference).

[0245] In some embodiments, dCas9 corresponds to, or comprises in part or in whole, a Cas9 amino acid sequence having one or more mutations that inactivate the Cas9 nuclease activity. In some embodiments, the nuclease-inactive dCas9 domain comprises a D10X mutation and a H840X mutation of the amino acid sequence set forth herein, or a corresponding mutation in any of the amino acid sequences provided herein, wherein X is any amino acid change. In some embodiments, the nuclease-inactive dCas9 domain comprises a D10A mutation and a H840A mutation of the amino acid sequence set forth herein, or a corresponding mutation in any of the amino acid sequences provided herein. In some embodiments, a nuclease-inactive Cas9 domain comprises the amino acid sequence set forth in Cloning vector pPlatTET-gRNA2 (Accession No. BAV54124).

[0246] In some embodiments, a variant Cas9 protein can cleave the complementary strand of a guide target sequence but has reduced ability to cleave the non-complementary strand of a double stranded guide target sequence. For example, the variant Cas9 protein can have a mutation (amino acid substitution) that reduces the function of the RuvC domain. As a non-limiting example, in some embodiments, a variant Cas9 protein has a D10A (aspartate to alanine at amino acid position 10) and can therefore cleave the complementary strand of a double stranded guide target sequence but has reduced ability to cleave the non-complementary strand of a double stranded guide target sequence (thus resulting in a single strand break (SSB) instead of a double strand break (DSB) when the variant Cas9 protein cleaves a double stranded target nucleic acid) (see, for example, Jinek et al., Science. 2012 Aug. 17; 337(6096):816-21).

[0247] In some embodiments, a variant Cas9 protein can cleave the non-complementary strand of a double stranded guide target sequence but has reduced ability to cleave the complementary strand of the guide target sequence. For example, the variant Cas9 protein can have a mutation (amino acid substitution) that reduces the function of the HNH domain (RuvC/HNH/RuvC domain motifs). As a non-limiting example, in some embodiments, the variant Cas9 protein has an H840A (histidine to alanine at amino acid position 840) mutation and can therefore cleave the non-complementary strand of the guide target sequence but has reduced ability to cleave the complementary strand of the guide target sequence (thus resulting in a SSB instead of a DSB when the variant Cas9 protein cleaves a double stranded guide target sequence). Such a Cas9 protein has a reduced ability to cleave a guide target sequence (e.g., a single stranded guide target sequence) but retains the ability to bind a guide target sequence (e.g., a single stranded guide target sequence).

[0248] As another non-limiting example, in some embodiments, the variant Cas9 protein harbors W476A and W1126A mutations such that the polypeptide has a reduced ability to cleave a target DNA. Such a Cas9 protein has a reduced ability to cleave a target DNA (e.g., a single stranded target DNA) but retains the ability to bind a target DNA (e.g., a single stranded target DNA).

[0249] As another non-limiting example, in some embodiments, the variant Cas9 protein harbors P475A, W476A, N477A, D1125A, W1126A, and D1127A mutations such that the polypeptide has a reduced ability to cleave a target DNA. Such a Cas9 protein has a reduced ability to cleave a target DNA (e.g., a single stranded target DNA) but retains the ability to bind a target DNA (e.g., a single stranded target DNA).

[0250] As another non-limiting example, in some embodiments, the variant Cas9 protein harbors H840A, W476A, and W1126A, mutations such that the polypeptide has a reduced ability to cleave a target DNA. Such a Cas9 protein has a reduced ability to cleave a target DNA (e.g., a single stranded target DNA) but retains the ability to bind a target DNA (e.g., a single stranded target DNA). As another non-limiting example, in some embodiments, the variant Cas9 protein harbors H840A, D10A, W476A, and W1126A, mutations such that the polypeptide has a reduced ability to cleave a target DNA. Such a Cas9 protein has a reduced ability to cleave a target DNA (e.g., a single stranded target DNA) but retains the ability to bind a target DNA (e.g., a single stranded target DNA). In some embodiments, the variant Cas9 has restored catalytic His residue at position 840 in the Cas9 HNH domain (A840H).

[0251] As another non-limiting example, in some embodiments, the variant Cas9 protein harbors, H840A, P475A, W476A, N477A, D1125A, W1126A, and D1127A mutations such that the polypeptide has a reduced ability to cleave a target DNA. Such a Cas9 protein has a reduced ability to cleave a target DNA (e.g., a single stranded target DNA) but retains the ability to bind a target DNA (e.g., a single stranded target DNA). As another non-limiting example, in some embodiments, the variant Cas9 protein harbors D10A, H840A, P475A, W476A, N477A, D1125A, W1126A, and D1127A mutations such that the polypeptide has a reduced ability to cleave a target DNA. Such a Cas9 protein has a reduced ability to cleave a target DNA (e.g., a single stranded target DNA) but retains the ability to bind a target DNA (e.g., a single stranded target DNA). In some embodiments, when a variant Cas9 protein harbors W476A and W1126A mutations or when the variant Cas9 protein harbors P475A, W476A, N477A, D1125A, W1126A, and D1127A mutations, the variant Cas9 protein does not bind efficiently to a PAM sequence. Thus, in some such embodiments, when such a variant Cas9 protein is used in a method of binding, the method does not require a PAM sequence. In other words, in some embodiments, when such a variant Cas9 protein is used in a method of binding, the method can include a guide RNA, but the method can be performed in the absence of a PAM sequence (and the specificity of binding is therefore provided by the targeting segment of the guide RNA). Other residues can be mutated to achieve the above effects (i.e., inactivate one or the other nuclease portions). As non-limiting examples, residues D10, G12, G17, E762, H840, N854, N863, H982, H983, A984, D986, and/or A987 can be altered (i.e., substituted). Also, mutations other than alanine substitutions are suitable.

[0252] In some embodiments, a variant Cas9 protein that has reduced catalytic activity (e.g., when a Cas9 protein has a D10, G12, G17, E762, H840, N854, N863, H982, H983, A984, D986, and/or a A987 mutation, e.g., D10A, G12A, G17A, E762A, H840A, N854A, N863A, H982A, H983A, A984A, and/or D986A), the variant Cas9 protein can still bind to target DNA in a site-specific manner (because it is still guided to a target DNA sequence by a guide RNA) as long as it retains the ability to interact with the guide RNA.

[0253] In some embodiments, the variant Cas protein can be spCas9, spCas9-VRQR, spCas9-VRER, xCas9 (sp), saCas9, saCas9-KKH, spCas9-MQKSER, spCas9-LRKIQK, or spCas9-LRVSQL.

[0254] In some embodiments, the Cas9 domain is a Cas9 domain from Staphylococcus aureus (SaCas9). In some embodiments, the SaCas9 domain is a nuclease active SaCas9, a nuclease inactive SaCas9 (SaCas9d), or a SaCas9 nickase (SaCas9n). In some embodiments, the SaCas9 comprises a N579A mutation, or a corresponding mutation in any of the amino acid sequences provided in the Sequence Listing submitted herewith.

[0255] In some embodiments, the SaCas9 domain, the SaCas9d domain, or the SaCas9n domain can bind to a nucleic acid sequence having a non-canonical PAM. In some embodiments, the SaCas9 domain, the SaCas9d domain, or the SaCas9n domain can bind to a nucleic acid sequence having a NNGRRT or a NNGRRV PAM sequence. In some embodiments, the SaCas9 domain comprises one or more of a E781X, a N967X, and a R1014X mutation, or a corresponding mutation in any of the amino acid sequences provided herein, wherein X is any amino acid. In some embodiments, the SaCas9 domain comprises one or more of a E781K, a N967K, and a R1014H mutation, or one or more corresponding mutation in any of the amino acid sequences provided herein. In some embodiments, the SaCas9 domain comprises a E781K, a N967K, or a R1014H mutation, or corresponding mutations in any of the amino acid sequences provided herein.

[0256] In some embodiments, one of the Cas9 domains present in the fusion protein may be replaced with a guide nucleotide sequence-programmable DNA-binding protein domain that has no requirements for a PAM sequence. In some embodiments, the Cas9 is an SaCas9. Residue A579 of SaCas9 can be mutated from N579 to yield a SaCas9 nickase. Residues K781, K967, and H1014 can be mutated from E781, N967, and R1014 to yield a SaKKH Cas9.

[0257] In some embodiments, a modified SpCas9 including amino acid substitutions D1135M, S1136Q, G1218K, E1219F, A1322R, D1332A, R1335E, and T1337R (SpCas9-MQKFRAER) and having specificity for the altered PAM 5′-NGC-3′ was used.

[0258] Alternatives to S. pyogenes Cas9 can include RNA-guided endonucleases from the Cpf1 family that display cleavage activity in mammalian cells. CRISPR from Prevotella and Francisella 1 (CRISPR/Cpf1) is a DNA-editing technology analogous to the CRISPR/Cas9 system. Cpf1 is an RNA-guided endonuclease of a class II CRISPR/Cas system. This acquired immune mechanism is found in Prevotella and Francisella bacteria. Cpf1 genes are associated with the CRISPR locus, coding for an endonuclease that use a guide RNA to find and cleave viral DNA. Cpf1 is a smaller and simpler endonuclease than Cas9, overcoming some of the CRISPR/Cas9 system limitations. Unlike Cas9 nucleases, the result of Cpf1-mediated DNA cleavage is a double-strand break with a short 3′ overhang. Cpf1's staggered cleavage pattern can open up the possibility of directional gene transfer, analogous to traditional restriction enzyme cloning, which can increase the efficiency of nucleic acid editing. Like the Cas9 variants and orthologues described above, Cpf1 can also expand the number of sites that can be targeted by CRISPR to AT-rich regions or AT-rich genomes that lack the NGG PAM sites favored by SpCas9. The Cpf1 locus contains a mixed alpha/beta domain, a RuvC-I followed by a helical region, a RuvC-II and a zinc finger-like domain. The Cpf1 protein has a RuvC-like endonuclease domain that is similar to the RuvC domain of Cas9.

[0259] Furthermore, Cpf1, unlike Cas9, does not have a HNH endonuclease domain, and the N-terminal of Cpf1 does not have the alpha-helical recognition lobe of Cas9. Cpf1 CRISPR-Cas domain architecture shows that Cpf1 is functionally unique, being classified as Class 2, type V CRISPR system. The Cpf1 loci encode Cas1, Cas2 and Cas4 proteins that are more similar to types I and III than type II systems. Functional Cpf1 does not require the trans-activating CRISPR RNA (tracrRNA), therefore, only CRISPR (crRNA) is required. This benefits genome editing because Cpf1 is not only smaller than Cas9, but also it has a smaller sgRNA molecule (approximately half as many nucleotides as Cas9). The Cpf1-crRNA complex cleaves target DNA or RNA by identification of a protospacer adjacent motif 5′-YTN-3′ or 5′-TTN-3′ in contrast to the G-rich PAM targeted by Cas9. After identification of PAM, Cpf1 introduces a sticky-end-like DNA double-stranded break having an overhang of 4 or 5 nucleotides.

[0260] In some embodiments, the Cas9 is a Cas9 variant having specificity for an altered PAM sequence. In some embodiments, the Additional Cas9 variants and PAM sequences are described in Miller, S. M., et al. Continuous evolution of SpCas9 variants compatible with non-G PAMs, Nat. Biotechnol. (2020), the entirety of which is incorporated herein by reference. in some embodiments, a Cas9 variate have no specific PAM requirements. In some embodiments, a Cas9 variant, e.g. a SpCas9 variant has specificity for a NRNH PAM, wherein R is A or G and H is A, C, or T. In some embodiments, the SpCas9 variant has specificity for a PAM sequence AAA, TAA, CAA, GAA, TAT, GAT, or CAC. In some embodiments, the SpCas9 variant comprises an amino acid substitution at position 1114, 1134, 1135, 1137, 1139, 1151, 1180, 1188, 1211, 1218, 1219, 1221, 1249, 1256, 1264, 1290, 1318, 1317, 1320, 1321, 1323, 1332, 1333, 1335, 1337, or 1339 or a corresponding position thereof. In some embodiments, the SpCas9 variant comprises an amino acid substitution at position 1114, 1135, 1218, 1219, 1221, 1249, 1320, 1321, 1323, 1332, 1333, 1335, or 1337 or a corresponding position thereof. In some embodiments, the SpCas9 variant comprises an amino acid substitution at position 1114, 1134, 1135, 1137, 1139, 1151, 1180, 1188, 1211, 1219, 1221, 1256, 1264, 1290, 1318, 1317, 1320, 1323, 1333 or a corresponding position thereof. In some embodiments, the SpCas9 variant comprises an amino acid substitution at position 1114, 1131, 1135, 1150, 1156, 1180, 1191, 1218, 1219, 1221, 1227, 1249, 1253, 1286, 1293, 1320, 1321, 1332, 1335, 1339 or a corresponding position thereof. In some embodiments, the SpCas9 variant comprises an amino acid substitution at position 1114, 1127, 1135, 1180, 1207, 1219, 1234, 1286, 1301, 1332, 1335, 1337, 1338, 1349 or a corresponding position thereof. Exemplary amino acid substitutions and PAM specificity of SpCas9 variants are shown in Tables 2A-2D.

TABLE 2A
SpCas9 Variants

| | SpCas9 amino acid position | | | | | | | | | | | | |
|---|---|---|---|---|---|---|---|---|---|---|---|---|---|
| | 1114 | 1135 | 1218 | 1219 | 1221 | 1249 | 1320 | 1321 | 1323 | 1332 | 1333 | 1335 | 1337 |
| SpCas9 | R | D | G | E | Q | P | A | P | A | D | R | R | T |
| AAA | | N | | V | H | | | | | | G | | |
| AAA | | N | | V | H | | | | | | G | | |
| AAA | | | | V | | | | | | | G | | |
| TAA | G | N | | V | | | | | | | I | | |
| TAA | | N | | V | | | | | | | I | | A |
| TAA | G | N | | V | | | | | | | I | | A |
| CAA | | | | V | | | | | | | K | | |
| CAA | | N | | V | | | | | | | K | | |
| CAA | | N | | V | | | | | | | K | | |
| GAA | | | | V | H | | V | | | | K | | |
| GAA | | N | | V | | | V | | | | K | | |
| GAA | | | | V | H | | V | | | | K | | |
| TAT | | | S | V | H | S | | S | | | | L | |
| TAT | | | S | V | H | S | | S | | | | L | |
| TAT | | | S | V | H | S | | S | | | | L | |
| GAT | | | | V | | | | | | | I | | |
| GAT | | | | V | | | | | D | | | Q | |
| GAT | | | | V | | | | | D | | | Q | |
| CAC | | | | V | | | | | | N | | Q | N |
| CAC | | N | | V | | | | | | | | Q | N |
| CAC | | | | V | | | | | | N | | Q | N |

TABLE 2B

| | SpCas9 amino acid position | | | | | | | | | | | | | | | | | | |
|---|---|---|---|---|---|---|---|---|---|---|---|---|---|---|---|---|---|---|---|
| | 1114 | 1134 | 1135 | 1137 | 1139 | 1151 | 1180 | 1188 | 1211 | 1219 | 1221 | 1256 | 1264 | 1290 | 1318 | 1317 | 1320 | 1323 | 1333 |
| SpCas9 | R | F | D | P | V | K | D | K | K | E | Q | Q | H | V | L | N | A | A | R |
| GAA | | | | | | | | | | V | H | | | | | | V | | K |
| GAA | | | N | S | | | | | | V | | | | | | | V | D | K |
| GAA | | | N | | | | | | | V | H | | Y | | | | V | | K |
| CAA | | | N | | | | | | | V | H | | Y | | | | V | | K |
| CAA | G | | N | S | | | | | | V | H | | Y | | | | V | | K |
| CAA | | | N | | | | | R | | V | H | | | | | | V | | K |
| CAA | | | N | | | | G | | R | V | H | | Y | | | | V | | K |
| CAA | | | N | | | | | | | V | H | | Y | | | | V | | K |
| AAA | | | N | | | | G | | | V | H | R | Y | | | | V | D | K |
| CAA | G | | N | | | | G | | | V | H | | Y | | | | V | D | K |
| CAA | | L | N | | | | G | | | V | H | | Y | | | T | V | D | K |
| TAA | G | | N | | | | G | | | V | H | | Y | G | S | | V | D | K |
| TAA | G | | N | | | E | G | | | V | H | | Y | | S | | V | | K |
| TAA | G | | N | | | | G | | | V | H | | Y | | S | | V | D | K |
| TAA | G | | N | | | | G | | R | V | H | | | | | | V | | K |
| TAA | | | N | | | | G | | R | V | H | | Y | | | | V | | K |
| TAA | G | | N | | A | | G | | | V | H | | | | | | V | | K |
| TAA | G | | N | | | | | | | V | H | | | | | | V | | K |

TABLE 2C

| | SpCas9 amino acid position | | | | | | | | | | | |
|---|---|---|---|---|---|---|---|---|---|---|---|---|
| | 1114 | 1131 | 1135 | 1150 | 1156 | 1180 | 1191 | 1218 | 1219 | 1221 | 1227 | 1249 |
| SpCas9 | R | Y | D | E | K | D | K | G | E | Q | A | P |
| SacB.TAT | | | N | | | | N | | V | H | | |
| SacB.TAT | | | N | | | | | S | V | H | | S |
| AAT | | | N | | | | | S | V | H | V | S |
| TAT | G | | N | | | G | | S | V | H | | S |
| TAT | G | | N | | | G | | S | V | H | | S |
| TAT | G | C | N | | | G | | S | V | H | | S |
| TAT | G | C | N | | | G | | S | V | H | | S |
| TAT | G | C | N | | | G | | S | V | H | | S |
| TAT | G | C | N | | E | G | | S | V | H | | S |
| TAT | G | C | N | V | | G | | S | V | H | | S |
| TAT | | C | N | | | G | | S | V | H | | S |
| TAT | G | C | N | | | G | | S | V | H | | S |

| | SpCas9 amino acid position | | | | | | | |
|---|---|---|---|---|---|---|---|---|
| | 1253 | 1286 | 1293 | 1320 | 1321 | 1332 | 1335 | 1339 |
| SpCas9 | E | N | A | A | P | D | R | T |
| SacB.TAT | | | | V | S | | L | |
| SacB.TAT | | | | | S | G | L | |
| AAT | | K | T | | S | G | L | I |
| TAT | K | | | | S | G | L | |
| TAT | | | | | S | G | L | |
| TAT | | | | | S | G | L | |
| TAT | | | | | S | G | L | |
| TAT | | | | | S | G | L | |
| TAT | | | | | S | G | L | |
| TAT | | | | | S | G | L | |
| TAT | | | | | S | G | L | |
| TAT | | | | | S | G | L | |

TABLE 2D

| | SpCas9 amino acid position | | | | | | | | | | | | | |
|---|---|---|---|---|---|---|---|---|---|---|---|---|---|---|
| | 1114 | 1127 | 1135 | 1180 | 1207 | 1219 | 1234 | 1286 | 1301 | 1332 | 1335 | 1337 | 1338 | 1349 |
| SpCas9 | R | D | D | D | E | E | N | N | P | D | R | T | S | H |
| SacB.CAC | | | N | | | V | | | | N | Q | N | | |
| AAC | G | | N | | | V | | | | N | Q | N | | |
| AAC | G | | N | | | V | | | | N | Q | N | | |
| TAC | G | | N | | | V | | | | N | Q | N | | |
| TAC | G | | N | | | V | | H | | N | Q | N | | |
| TAC | G | | N | | G | V | D | H | | N | Q | N | | |
| TAC | G | | N | | | V | | | | N | Q | N | | |
| TAC | G | G | N | E | | V | | H | | N | Q | N | | |
| TAC | G | | N | | | V | | H | | N | Q | N | | |
| TAC | G | | N | | | V | | | | N | Q | N | T | R |

[0261] In some embodiments, the nucleic acid programmable DNA binding protein (napDNAbp) is a single effector of a microbial CRISPR-Cas system. Single effectors of microbial CRISPR-Cas systems include, without limitation, Cas9, Cpf1, Cas12b/C2cl, and Cas12c/C2c3. Typically, microbial CRISPR-Cas systems are divided into Class 1 and Class 2 systems. Class 1 systems have multisubunit effector complexes, while Class 2 systems have a single protein effector. For example, Cas9 and Cpf1 are Class 2 effectors. In addition to Cas9 and Cpf1, three distinct Class 2 CRISPR-Cas systems (Cas12b/C2cl, and Cas12c/C2c3) have been described by Shmakov et al., “Discovery and Functional Characterization of Diverse Class 2 CRISPR Cas Systems”, Mol. Cell, 2015 Nov. 5; 60(3): 385-397, the entire contents of which is hereby incorporated by reference. Effectors of two of the systems, Cas12b/C2cl, and Cas12c/C2c3, contain RuvC-like endonuclease domains related to Cpf1. A third system contains an effector with two predicated HEPN RNase domains. Production of mature CRISPR RNA is tracrRNA-independent, unlike production of CRISPR RNA by Cas12b/C2c1. Cas12b/C2c1 depends on both CRISPR RNA and tracrRNA for DNA cleavage.

[0262] In some embodiments, the napDNAbp is a circular permutant (e.g., SEQ ID NO: 257).

[0263] The crystal structure of Alicyclobaccillus acidoterrastris Cas12b/C2c1 (AacC2c1) has been reported in complex with a chimeric single-molecule guide RNA (sgRNA). See e.g., Liu et al., “C2cl-sgRNA Complex Structure Reveals RNA-Guided DNA Cleavage Mechanism”, Mol. Cell, 2017 Jan. 19; 65(2):310-322, the entire contents of which are hereby incorporated by reference. The crystal structure has also been reported in Alicyclobacillus acidoterrestris C2cl bound to target DNAs as ternary complexes. See e.g., Yang et al., “PAM-dependent Target DNA Recognition and Cleavage by C2C1 CRISPR-Cas endonuclease”, Cell, 2016 Dec. 15; 167(7):1814-1828, the entire contents of which are hereby incorporated by reference. Catalytically competent conformations of AacC2c1, both with target and non-target DNA strands, have been captured independently positioned within a single RuvC catalytic pocket, with Cas12b/C2cl-mediated cleavage resulting in a staggered seven-nucleotide break of target DNA. Structural comparisons between Cas12b/C2c1 ternary complexes and previously identified Cas9 and Cpf1 counterparts demonstrate the diversity of mechanisms used by CRISPR-Cas9 systems.

[0264] In some embodiments, the nucleic acid programmable DNA binding protein (napDNAbp) of any of the fusion proteins provided herein may be a Cas12b/C2cl, or a Cas12c/C2c3 protein. In some embodiments, the napDNAbp is a Cas12b/C2c1 protein. In some embodiments, the napDNAbp is a Cas12c/C2c3 protein. In some embodiments, the napDNAbp comprises an amino acid sequence that is at least 85%, at least 90%, at least 91%, at least 92%, at least 93%, at least 94%, at least 95%, at least 96%, at least 97%, at least 98%, at least 99%, or at ease 99.5% identical to a naturally-occurring Cas12b/C2c1 or Cas12c/C2c3 protein. In some embodiments, the napDNAbp is a naturally-occurring Cas12b/C2c1 or Cas12c/C2c3 protein. In some embodiments, the napDNAbp comprises an amino acid sequence that is at least 85%, at least 90%, at least 91%, at least 92%, at least 93%, at least 94%, at least 95%, at least 96%, at least 97%, at least 98%, at least 99%, or at ease 99.5% identical to any one of the napDNAbp sequences provided herein. It should be appreciated that Cas12b/C2c1 or Cas12c/C2c3 from other bacterial species may also be used in accordance with the present disclosure.

[0265] In some embodiments, a napDNAbp refers to Cas12c. In some embodiments, the Cas12c protein is a Cas12cl (SEQ ID NO: 266) or a variant of Cas12cl. In some embodiments, the Cas12 protein is a Cas12c2 (SEQ ID NO: 267) or a variant of Cas12c2. In some embodiments, the Cas12 protein is a Cas12c protein from Oleiphilus sp. H10009 (i.e., OspCas12c; SEQ ID NO: 268) or a variant of OspCas12c. These Cas12c molecules have been described in Yan et al., “Functionally Diverse Type V CRISPR-Cas Systems,” Science, 2019 Jan. 4; 363: 88-91; the entire contents of which is hereby incorporated by reference. In some embodiments, the napDNAbp comprises an amino acid sequence that is at least 85%, at least 90%, at least 91%, at least 92%, at least 93%, at least 94%, at least 95%, at least 96%, at least 97%, at least 98%, at least 99%, or at least 99.5% identical to a naturally-occurring Cas12cl, Cas12c2, or OspCas12c protein. In some embodiments, the napDNAbp is a naturally-occurring Cas12cl, Cas12c2, or OspCas12c protein. In some embodiments, the napDNAbp comprises an amino acid sequence that is at least 85%, at least 90%, at least 91%, at least 92%, at least 93%, at least 94%, at least 95%, at least 96%, at least 97%, at least 98%, at least 99%, or at ease 99.5% identical to any Cas12cl, Cas12c2, or OspCas12c protein described herein. It should be appreciated that Cas12cl, Cas12c2, or OspCas12c from other bacterial species may also be used in accordance with the present disclosure.

[0266] In some embodiments, a napDNAbp refers to Cas12g, Cas12h, or Cas12i, which have been described in, for example, Yan et al., “Functionally Diverse Type V CRISPR-Cas Systems,” Science, 2019 Jan. 4; 363: 88-91; the entire contents of each is hereby incorporated by reference. Exemplary Cas12g, Cas12h, and Cas12i polypeptide sequences are provided in the Sequence Listing as SEQ ID NOs: 269-272. By aggregating more than 10 terabytes of sequence data, new classifications of Type V Cas proteins were identified that showed weak similarity to previously characterized Class V protein, including Cas12g, Cas12h, and Cas12i. In some embodiments, the Cas12 protein is a Cas12g or a variant of Cas12g. In some embodiments, the Cas12 protein is a Cas12h or a variant of Cas12h. In some embodiments, the Cas12 protein is a Cas12i or a variant of Cas12i. It should be appreciated that other RNA-guided DNA binding proteins may be used as a napDNAbp, and are within the scope of this disclosure. In some embodiments, the napDNAbp comprises an amino acid sequence that is at least 85%, at least 90%, at least 91%, at least 92%, at least 93%, at least 94%, at least 95%, at least 96%, at least 97%, at least 98%, at least 99%, or at least 99.5% identical to a naturally-occurring Cas12g, Cas12h, or Cas12i protein. In some embodiments, the napDNAbp is a naturally-occurring Cas12g, Cas12h, or Cas12i protein. In some embodiments, the napDNAbp comprises an amino acid sequence that is at least 85%, at least 90%, at least 91%, at least 92%, at least 93%, at least 94%, at least 95%, at least 96%, at least 97%, at least 98%, at least 99%, or at ease 99.5% identical to any Cas12g, Cas12h, or Cas12i protein described herein. It should be appreciated that Cas12g, Cas12h, or Cas12i from other bacterial species may also be used in accordance with the present disclosure.

[0267] In some embodiments, the Cas12i is a Cas12i1 or a Cas12i2. In some embodiments, the nucleic acid programmable DNA binding protein (napDNAbp) of any of the fusion proteins provided herein may be a Cas12j/Casq) protein. Cas12j/Casq) is described in Pausch et al., “CRISPR-CasΦ from huge phages is a hypercompact genome editor,” Science, 17 Jul. 2020, Vol. 369, Issue 6501, pp. 333-337, which is incorporated herein by reference in its entirety. In some embodiments, the napDNAbp comprises an amino acid sequence that is at least 85%, at least 90%, at least 91%, at least 92%, at least 93%, at least 94%, at least 95%, at least 96%, at least 97%, at least 98%, at least 99%, or at ease 99.5% identical to a naturally-occurring Cas12j/CasΦ protein. In some embodiments, the napDNAbp is a naturally-occurring Cas12j/CasΦ protein. In some embodiments, the napDNAbp is a nuclease inactive (“dead”) Cas12j/CasΦ protein. It should be appreciated that Cas12j/CasΦ from other species may also be used in accordance with the present disclosure.

Fusion Proteins with Internal Insertion

[0268] Provided herein are fusion proteins comprising a heterologous polypeptide fused to a nucleic acid programmable nucleic acid binding protein, for example, a napDNAbp. A heterologous polypeptide can be a polypeptide that is not found in the native or wild-type napDNAbp polypeptide sequence. The heterologous polypeptide can be fused to the napDNAbp at a C-terminal end of the napDNAbp, an N-terminal end of the napDNAbp, or inserted at an internal location of the napDNAbp In some embodiments, the heterologous polypeptide is a deaminase (e.g., cytidine of adenosine deaminase) or a functional fragment thereof. For example, a fusion protein can comprise a deaminase flanked by an N-terminal fragment and a C-terminal fragment of a Cas9 or Cas12 (e.g., Cas12b/C2c1), polypeptide. In some embodiments, the cytidine deaminase is an APOBEC deaminase (e.g., APOBEC1). In some embodiments, the adenosine deaminase is a TadA (e.g., TadA*7.10 or TadA*8). In some embodiments, the TadA is a TadA*8 or a TadA*9. TadA sequences (e.g., TadA7.10 or TadA*8) as described herein are suitable deaminases for the above-described fusion proteins.

[0269] In some embodiments, the fusion protein comprises the structure:

NH2-[N-terminal fragment of a napDNAbp]-[deaminase]-[C-terminal fragment of a napDNAbp]-COOH;
NH2-[N-terminal fragment of a Cas9]-[adenosine deaminase]-[C-terminal fragment of a Cas9]-COOH;
NH2-[N-terminal fragment of a Cas12]-[adenosine deaminase]-[C-terminal fragment of a Cas12]-COOH;
NH2-[N-terminal fragment of a Cas9]-[cytidine deaminase]-[C-terminal fragment of a Cas9]-COOH;
NH2-[N-terminal fragment of a Cas12]-[cytidine deaminase]-[C-terminal fragment of a Cas12]-COOH;
wherein each instance of “]-[” is an optional linker.

[0270] The deaminase can be a circular permutant deaminase. For example, the deaminase can be a circular permutant adenosine deaminase. In some embodiments, the deaminase is a circular permutant TadA, circularly permutated at amino acid residue 116, 136, or 65 as numbered in the TadA reference sequence.

[0271] The fusion protein can comprise more than one deaminase. The fusion protein can comprise, for example, 1, 2, 3, 4, 5 or more deaminases. In some embodiments, the fusion protein comprises one or two deaminase. The two or more deaminases in a fusion protein can be an adenosine deaminase, a cytidine deaminase, or a combination thereof. The two or more deaminases can be homodimers or heterodimers. The two or more deaminases can be inserted in tandem in the napDNAbp. In some embodiments, the two or more deaminases may not be in tandem in the napDNAbp.

[0272] In some embodiments, the napDNAbp in the fusion protein is a Cas9 polypeptide or a fragment thereof. The Cas9 polypeptide can be a variant Cas9 polypeptide. In some embodiments, the Cas9 polypeptide is a Cas9 nickase (nCas9) polypeptide or a fragment thereof. In some embodiments, the Cas9 polypeptide is a nuclease dead Cas9 (dCas9) polypeptide or a fragment thereof. The Cas9 polypeptide in a fusion protein can be a full-length Cas9 polypeptide. In some cases, the Cas9 polypeptide in a fusion protein may not be a full length Cas9 polypeptide. The Cas9 polypeptide can be truncated, for example, at a N-terminal or C-terminal end relative to a naturally-occurring Cas9 protein. The Cas9 polypeptide can be a circularly permuted Cas9 protein. The Cas9 polypeptide can be a fragment, a portion, or a domain of a Cas9 polypeptide, that is still capable of binding the target polynucleotide and a guide nucleic acid sequence.

[0273] In some embodiments, the Cas9 polypeptide is a Streptococcus pyogenes Cas9 (SpCas9), Staphylococcus aureus Cas9 (SaCas9), Streptococcus thermophilus 1 Cas9 (St1Cas9), or fragments or variants of any of the Cas9 polypeptides described herein.

[0274] In some embodiments, the fusion protein comprises an adenosine deaminase domain and a cytidine deaminase domain inserted within a Cas9. In some embodiments, an adenosine deaminase is fused within a Cas9 and a cytidine deaminase is fused to the C-terminus. In some embodiments, an adenosine deaminase is fused within Cas9 and a cytidine deaminase fused to the N-terminus. In some embodiments, a cytidine deaminase is fused within Cas9 and an adenosine deaminase is fused to the C-terminus. In some embodiments, a cytidine deaminase is fused within Cas9 and an adenosine deaminase fused to the N-terminus.

[0275] Exemplary structures of a fusion protein with an adenosine deaminase and a cytidine deaminase and a Cas9 are provided as follows:

NH2-[Cas9(adenosine deaminase)]-[cytidine deaminase]-COOH;
NH2-[cytidine deaminase]-[Cas9(adenosine deaminase)]-COOH;
NH2-[Cas9(cytidine deaminase)]-[adenosine deaminase]-COOH; or
NH2-[adenosine deaminase]-[Cas9(cytidine deaminase)]-COOH.

[0276] In some embodiments, the “-” used in the general architecture above indicates the presence of an optional linker.

[0277] In various embodiments, the catalytic domain has DNA modifying activity (e.g., deaminase activity), such as adenosine deaminase activity. In some embodiments, the adenosine deaminase is a TadA (e.g., TadA*7.10). In some embodiments, the TadA is a TadA*8. In some embodiments, a TadA*8 is fused within Cas9 and a cytidine deaminase is fused to the C-terminus.

[0278] In some embodiments, a TadA*8 is fused within Cas9 and a cytidine deaminase fused to the N-terminus. In some embodiments, a cytidine deaminase is fused within Cas9 and a TadA*8 is fused to the C-terminus. In some embodiments, a cytidine deaminase is fused within Cas9 and a TadA*8 fused to the N-terminus. Exemplary structures of a fusion protein with a TadA*8 and a cytidine deaminase and a Cas9 are provided as follows:

NH2-[Cas9(TadA*8)]-[cytidine deaminase]-COOH;
NH2-[cytidine deaminase]-[Cas9(TadA*8)]-COOH;
NH2-[Cas9(cytidine deaminase)]-[TadA*8]-COOH; or
NH2-[TadA*8]-[Cas9(cytidine deaminase)]-COOH.

[0279] In some embodiments, the “-” used in the general architecture above indicates the presence of an optional linker.

[0280] The heterologous polypeptide (e.g., deaminase) can be inserted in the napDNAbp (e.g., Cas9 or Cas12 (e.g., Cas12b/C2c1)) at a suitable location, for example, such that the napDNAbp retains its ability to bind the target polynucleotide and a guide nucleic acid. A deaminase (e.g., adenosine deaminase, cytidine deaminase, or adenosine deaminase and cytidine deaminase) can be inserted into a napDNAbp without compromising function of the deaminase (e.g., base editing activity) or the napDNAbp (e.g., ability to bind to target nucleic acid and guide nucleic acid). A deaminase (e.g., adenosine deaminase, cytidine deaminase, or adenosine deaminase and cytidine deaminase) can be inserted in the napDNAbp at, for example, a disordered region or a region comprising a high temperature factor or B-factor as shown by crystallographic studies. Regions of a protein that are less ordered, disordered, or unstructured, for example solvent exposed regions and loops, can be used for insertion without compromising structure or function. A deaminase (e.g., adenosine deaminase, cytidine deaminase, or adenosine deaminase and cytidine deaminase) can be inserted in the napDNAbp in a flexible loop region or a solvent-exposed region. In some embodiments, the deaminase (e.g., adenosine deaminase, cytidine deaminase, or adenosine deaminase and cytidine deaminase) is inserted in a flexible loop of the Cas9 or the Cas12b/C2c1 polypeptide.

[0281] In some embodiments, the insertion location of a deaminase (e.g., adenosine deaminase, cytidine deaminase, or adenosine deaminase and cytidine deaminase) is determined by B-factor analysis of the crystal structure of Cas9 polypeptide. In some embodiments, the deaminase (e.g., adenosine deaminase, cytidine deaminase, or adenosine deaminase and cytidine deaminase) is inserted in regions of the Cas9 polypeptide comprising higher than average B-factors (e.g., higher B factors compared to the total protein or the protein domain comprising the disordered region). B-factor or temperature factor can indicate the fluctuation of atoms from their average position (for example, as a result of temperature-dependent atomic vibrations or static disorder in a crystal lattice). A high B-factor (e.g., higher than average B-factor) for backbone atoms can be indicative of a region with relatively high local mobility. Such a region can be used for inserting a deaminase without compromising structure or function. A deaminase (e.g., adenosine deaminase, cytidine deaminase, or adenosine deaminase and cytidine deaminase) can be inserted at a location with a residue having a Cα atom with a B-factor that is 50%, 60%, 70%, 80%, 90%, 100%, 110%, 120%, 130%, 140%, 150%, 160%, 170%, 180%, 190%, 200%, or greater than 200% more than the average B-factor for the total protein. A deaminase (e.g., adenosine deaminase, cytidine deaminase, or adenosine deaminase and cytidine deaminase) can be inserted at a location with a residue having a Cα atom with a B-factor that is 50%, 60%, 70%, 80%, 90%, 100%, 110%, 120%, 130%, 140%, 150%, 160%, 170%, 180%, 190%, 200% or greater than 200% more than the average B-factor for a Cas9 protein domain comprising the residue. Cas9 polypeptide positions comprising a higher than average B-factor can include, for example, residues 768, 792, 1052, 1015, 1022, 1026, 1029, 1067, 1040, 1054, 1068, 1246, 1247, and 1248 as numbered in the above Cas9 reference sequence. Cas9 polypeptide regions comprising a higher than average B-factor can include, for example, residues 792-872, 792-906, and 2-791 as numbered in the above Cas9 reference sequence.

[0282] A heterologous polypeptide (e.g., deaminase) can be inserted in the napDNAbp at an amino acid residue selected from the group consisting of: 768, 791, 792, 1015, 1016, 1022, 1023, 1026, 1029, 1040, 1052, 1054, 1067, 1068, 1069, 1246, 1247, and 1248 as numbered in the above Cas9 reference sequence, or a corresponding amino acid residue in another Cas9 polypeptide. In some embodiments, the heterologous polypeptide is inserted between amino acid positions 768-769, 791-792, 792-793, 1015-1016, 1022-1023, 1026-1027, 1029-1030, 1040-1041, 1052-1053, 1054-1055, 1067-1068, 1068-1069, 1247-1248, or 1248-1249 as numbered in the above Cas9 reference sequence or corresponding amino acid positions thereof. In some embodiments, the heterologous polypeptide is inserted between amino acid positions 769-770, 792-793, 793-794, 1016-1017, 1023-1024, 1027-1028, 1030-1031, 1041-1042, 1053-1054, 1055-1056, 1068-1069, 1069-1070, 1248-1249, or 1249-1250 as numbered in the above Cas9 reference sequence or corresponding amino acid positions thereof. In some embodiments, the heterologous polypeptide replaces an amino acid residue selected from the group consisting of: 768, 791, 792, 1015, 1016, 1022, 1023, 1026, 1029, 1040, 1052, 1054, 1067, 1068, 1069, 1246, 1247, and 1248 as numbered in the above Cas9 reference sequence, or a corresponding amino acid residue in another Cas9 polypeptide. It should be understood that the reference to the above Cas9 reference sequence with respect to insertion positions is for illustrative purposes. The insertions as discussed herein are not limited to the Cas9 polypeptide sequence of the above Cas9 reference sequence, but include insertion at corresponding locations in variant Cas9 polypeptides, for example a Cas9 nickase (nCas9), nuclease dead Cas9 (dCas9), a Cas9 variant lacking a nuclease domain, a truncated Cas9, or a Cas9 domain lacking partial or complete HNH domain.

[0283] A heterologous polypeptide (e.g., deaminase) can be inserted in the napDNAbp at an amino acid residue selected from the group consisting of: 768, 792, 1022, 1026, 1040, 1068, and 1247 as numbered in the above Cas9 reference sequence, or a corresponding amino acid residue in another Cas9 polypeptide. In some embodiments, the heterologous polypeptide is inserted between amino acid positions 768-769, 792-793, 1022-1023, 1026-1027, 1029-1030, 1040-1041, 1068-1069, or 1247-1248 as numbered in the above Cas9 reference sequence or corresponding amino acid positions thereof. In some embodiments, the heterologous polypeptide is inserted between amino acid positions 769-770, 793-794, 1023-1024, 1027-1028, 1030-1031, 1041-1042, 1069-1070, or 1248-1249 as numbered in the above Cas9 reference sequence or corresponding amino acid positions thereof. In some embodiments, the heterologous polypeptide replaces an amino acid residue selected from the group consisting of: 768, 792, 1022, 1026, 1040, 1068, and 1247 as numbered in the above Cas9 reference sequence, or a corresponding amino acid residue in another Cas9 polypeptide.

[0284] A heterologous polypeptide (e.g., deaminase) can be inserted in the napDNAbp at an amino acid residue as described herein, or a corresponding amino acid residue in another Cas9 polypeptide. In an embodiment, a heterologous polypeptide (e.g., deaminase) can be inserted in the napDNAbp at an amino acid residue selected from the group consisting of: 1002, 1003, 1025, 1052-1056, 1242-1247, 1061-1077, 943-947, 686-691, 569-578, 530-539, and 1060-1077 as numbered in the above Cas9 reference sequence, or a corresponding amino acid residue in another Cas9 polypeptide. The deaminase (e.g., adenosine deaminase, cytidine deaminase, or adenosine deaminase and cytidine deaminase) can be inserted at the N-terminus or the C-terminus of the residue or replace the residue. In some embodiments, the deaminase (e.g., adenosine deaminase, cytidine deaminase, or adenosine deaminase and cytidine deaminase) is inserted at the C-terminus of the residue.

[0285] In some embodiments, an adenosine deaminase (e.g., TadA) is inserted at an amino acid residue selected from the group consisting of: 1015, 1022, 1029, 1040, 1068, 1247, 1054, 1026, 768, 1067, 1248, 1052, and 1246 as numbered in the above Cas9 reference sequence, or a corresponding amino acid residue in another Cas9 polypeptide. In some embodiments, an adenosine deaminase (e.g., TadA) is inserted in place of residues 792-872, 792-906, or 2-791 as numbered in the above Cas9 reference sequence, or a corresponding amino acid residue in another Cas9 polypeptide. In some embodiments, the adenosine deaminase is inserted at the N-terminus of an amino acid selected from the group consisting of: 1015, 1022, 1029, 1040, 1068, 1247, 1054, 1026, 768, 1067, 1248, 1052, and 1246 as numbered in the above Cas9 reference sequence, or a corresponding amino acid residue in another Cas9 polypeptide. In some embodiments, the adenosine deaminase is inserted at the C-terminus of an amino acid selected from the group consisting of: 1015, 1022, 1029, 1040, 1068, 1247, 1054, 1026, 768, 1067, 1248, 1052, and 1246 as numbered in the above Cas9 reference sequence, or a corresponding amino acid residue in another Cas9 polypeptide. In some embodiments, the adenosine deaminase is inserted to replace an amino acid selected from the group consisting of: 1015, 1022, 1029, 1040, 1068, 1247, 1054, 1026, 768, 1067, 1248, 1052, and 1246 as numbered in the above Cas9 reference sequence, or a corresponding amino acid residue in another Cas9 polypeptide.

[0286] In some embodiments, a cytidine deaminase (e.g., APOBEC1) is inserted at an amino acid residue selected from the group consisting of: 1016, 1023, 1029, 1040, 1069, and 1247 as numbered in the above Cas9 reference sequence, or a corresponding amino acid residue in another Cas9 polypeptide. In some embodiments, the cytidine deaminase is inserted at the N-terminus of an amino acid selected from the group consisting of: 1016, 1023, 1029, 1040, 1069, and 1247 as numbered in the above Cas9 reference sequence, or a corresponding amino acid residue in another Cas9 polypeptide. In some embodiments, the cytidine deaminase is inserted at the C-terminus of an amino acid selected from the group consisting of: 1016, 1023, 1029, 1040, 1069, and 1247 as numbered in the above Cas9 reference sequence, or a corresponding amino acid residue in another Cas9 polypeptide. In some embodiments, the cytidine deaminase is inserted to replace an amino acid selected from the group consisting of: 1016, 1023, 1029, 1040, 1069, and 1247 as numbered in the above Cas9 reference sequence, or a corresponding amino acid residue in another Cas9 polypeptide.

[0287] In some embodiments, the deaminase (e.g., adenosine deaminase, cytidine deaminase, or adenosine deaminase and cytidine deaminase) is inserted at amino acid residue 768 as numbered in the above Cas9 reference sequence, or a corresponding amino acid residue in another Cas9 polypeptide. In some embodiments, the deaminase (e.g., adenosine deaminase, cytidine deaminase, or adenosine deaminase and cytidine deaminase) is inserted at the N-terminus of amino acid residue 768 as numbered in the above Cas9 reference sequence, or a corresponding amino acid residue in another Cas9 polypeptide. In some embodiments, the deaminase (e.g., adenosine deaminase, cytidine deaminase, or adenosine deaminase and cytidine deaminase) is inserted at the C-terminus of amino acid residue 768 as numbered in the above Cas9 reference sequence, or a corresponding amino acid residue in another Cas9 polypeptide. In some embodiments, the deaminase (e.g., adenosine deaminase, cytidine deaminase, or adenosine deaminase and cytidine deaminase) is inserted to replace amino acid residue 768 as numbered in the above Cas9 reference sequence, or a corresponding amino acid residue in another Cas9 polypeptide.

[0288] In some embodiments, the deaminase (e.g., adenosine deaminase, cytidine deaminase, or adenosine deaminase and cytidine deaminase) is inserted at amino acid residue 791 or is inserted at amino acid residue 792, as numbered in the above Cas9 reference sequence, or a corresponding amino acid residue in another Cas9 polypeptide. In some embodiments, the deaminase (e.g., adenosine deaminase, cytidine deaminase, or adenosine deaminase and cytidine deaminase) is inserted at the N-terminus of amino acid residue 791 or is inserted at the N-terminus of amino acid 792, as numbered in the above Cas9 reference sequence, or a corresponding amino acid residue in another Cas9 polypeptide. In some embodiments, the deaminase (e.g., adenosine deaminase, cytidine deaminase, or adenosine deaminase and cytidine deaminase) is inserted at the C-terminus of amino acid 791 or is inserted at the N-terminus of amino acid 792, as numbered in the above Cas9 reference sequence, or a corresponding amino acid residue in another Cas9 polypeptide. In some embodiments, the deaminase (e.g., adenosine deaminase, cytidine deaminase, or adenosine deaminase and cytidine deaminase) is inserted to replace amino acid 791, or is inserted to replace amino acid 792, as numbered in the above Cas9 reference sequence, or a corresponding amino acid residue in another Cas9 polypeptide.

[0289] In some embodiments, the deaminase (e.g., adenosine deaminase, cytidine deaminase, or adenosine deaminase and cytidine deaminase) is inserted at amino acid residue 1016 as numbered in the above Cas9 reference sequence, or a corresponding amino acid residue in another Cas9 polypeptide. In some embodiments, the deaminase (e.g., adenosine deaminase, cytidine deaminase, or adenosine deaminase and cytidine deaminase) is inserted at the N-terminus of amino acid residue 1016 as numbered in the above Cas9 reference sequence, or a corresponding amino acid residue in another Cas9 polypeptide. In some embodiments, the deaminase (e.g., adenosine deaminase, cytidine deaminase, or adenosine deaminase and cytidine deaminase) is inserted at the C-terminus of amino acid residue 1016 as numbered in the above Cas9 reference sequence, or a corresponding amino acid residue in another Cas9 polypeptide. In some embodiments, the deaminase (e.g., adenosine deaminase, cytidine deaminase, or adenosine deaminase and cytidine deaminase) is inserted to replace amino acid residue 1016 as numbered in the above Cas9 reference sequence, or a corresponding amino acid residue in another Cas9 polypeptide.

[0290] In some embodiments, the deaminase (e.g., adenosine deaminase, cytidine deaminase, or adenosine deaminase and cytidine deaminase) is inserted at amino acid residue 1022, or is inserted at amino acid residue 1023, as numbered in the above Cas9 reference sequence, or a corresponding amino acid residue in another Cas9 polypeptide. In some embodiments, the deaminase (e.g., adenosine deaminase, cytidine deaminase, or adenosine deaminase and cytidine deaminase) is inserted at the N-terminus of amino acid residue 1022 or is inserted at the N-terminus of amino acid residue 1023, as numbered in the above Cas9 reference sequence, or a corresponding amino acid residue in another Cas9 polypeptide. In some embodiments, the deaminase (e.g., adenosine deaminase, cytidine deaminase, or adenosine deaminase and cytidine deaminase) is inserted at the C-terminus of amino acid residue 1022 or is inserted at the C-terminus of amino acid residue 1023, as numbered in the above Cas9 reference sequence, or a corresponding amino acid residue in another Cas9 polypeptide. In some embodiments, the deaminase (e.g., adenosine deaminase, cytidine deaminase, or adenosine deaminase and cytidine deaminase) is inserted to replace amino acid residue 1022, or is inserted to replace amino acid residue 1023, as numbered in the above Cas9 reference sequence, or a corresponding amino acid residue in another Cas9 polypeptide.

[0291] In some embodiments, the deaminase (e.g., adenosine deaminase, cytidine deaminase, or adenosine deaminase and cytidine deaminase) is inserted at amino acid residue 1026, or is inserted at amino acid residue 1029, as numbered in the above Cas9 reference sequence, or a corresponding amino acid residue in another Cas9 polypeptide. In some embodiments, the deaminase (e.g., adenosine deaminase, cytidine deaminase, or adenosine deaminase and cytidine deaminase) is inserted at the N-terminus of amino acid residue 1026 or is inserted at the N-terminus of amino acid residue 1029, as numbered in the above Cas9 reference sequence, or a corresponding amino acid residue in another Cas9 polypeptide. In some embodiments, the deaminase (e.g., adenosine deaminase, cytidine deaminase, or adenosine deaminase and cytidine deaminase) is inserted at the C-terminus of amino acid residue 1026 or is inserted at the C-terminus of amino acid residue 1029, as numbered in the above Cas9 reference sequence, or a corresponding amino acid residue in another Cas9 polypeptide. In some embodiments, the deaminase (e.g., adenosine deaminase, cytidine deaminase, or adenosine deaminase and cytidine deaminase) is inserted to replace amino acid residue 1026, or is inserted to replace amino acid residue 1029, as numbered in the above Cas9 reference sequence, or corresponding amino acid residue in another Cas9 polypeptide.

[0292] In some embodiments, the deaminase (e.g., adenosine deaminase, cytidine deaminase, or adenosine deaminase and cytidine deaminase) is inserted at amino acid residue 1040 as numbered in the above Cas9 reference sequence, or a corresponding amino acid residue in another Cas9 polypeptide. In some embodiments, the deaminase (e.g., adenosine deaminase, cytidine deaminase, or adenosine deaminase and cytidine deaminase) is inserted at the N-terminus of amino acid residue 1040 as numbered in the above Cas9 reference sequence, or a corresponding amino acid residue in another Cas9 polypeptide. In some embodiments, the deaminase (e.g., adenosine deaminase, cytidine deaminase, or adenosine deaminase and cytidine deaminase) is inserted at the C-terminus of amino acid residue 1040 as numbered in the above Cas9 reference sequence, or a corresponding amino acid residue in another Cas9 polypeptide. In some embodiments, the deaminase (e.g., adenosine deaminase, cytidine deaminase, or adenosine deaminase and cytidine deaminase) is inserted to replace amino acid residue 1040 as numbered in the above Cas9 reference sequence, or a corresponding amino acid residue in another Cas9 polypeptide.

[0293] In some embodiments, the deaminase (e.g., adenosine deaminase, cytidine deaminase, or adenosine deaminase and cytidine deaminase) is inserted at amino acid residue 1052, or is inserted at amino acid residue 1054, as numbered in the above Cas9 reference sequence, or a corresponding amino acid residue in another Cas9 polypeptide. In some embodiments, the deaminase (e.g., adenosine deaminase, cytidine deaminase, or adenosine deaminase and cytidine deaminase) is inserted at the N-terminus of amino acid residue 1052 or is inserted at the N-terminus of amino acid residue 1054, as numbered in the above Cas9 reference sequence, or a corresponding amino acid residue in another Cas9 polypeptide. In some embodiments, the deaminase (e.g., adenosine deaminase, cytidine deaminase, or adenosine deaminase and cytidine deaminase) is inserted at the C-terminus of amino acid residue 1052 or is inserted at the C-terminus of amino acid residue 1054, as numbered in the above Cas9 reference sequence, or a corresponding amino acid residue in another Cas9 polypeptide. In some embodiments, the deaminase (e.g., adenosine deaminase, cytidine deaminase, or adenosine deaminase and cytidine deaminase) is inserted to replace amino acid residue 1052, or is inserted to replace amino acid residue 1054, as numbered in the above Cas9 reference sequence, or a corresponding amino acid residue in another Cas9 polypeptide.

[0294] In some embodiments, the deaminase (e.g., adenosine deaminase, cytidine deaminase, or adenosine deaminase and cytidine deaminase) is inserted at amino acid residue 1067, or is inserted at amino acid residue 1068, or is inserted at amino acid residue 1069, as numbered in the above Cas9 reference sequence, or a corresponding amino acid residue in another Cas9 polypeptide. In some embodiments, the deaminase (e.g., adenosine deaminase, cytidine deaminase, or adenosine deaminase and cytidine deaminase) is inserted at the N-terminus of amino acid residue 1067 or is inserted at the N-terminus of amino acid residue 1068 or is inserted at the N-terminus of amino acid residue 1069, as numbered in the above Cas9 reference sequence, or a corresponding amino acid residue in another Cas9 polypeptide. In some embodiments, the deaminase (e.g., adenosine deaminase, cytidine deaminase, or adenosine deaminase and cytidine deaminase) is inserted at the C-terminus of amino acid residue 1067 or is inserted at the C-terminus of amino acid residue 1068 or is inserted at the C-terminus of amino acid residue 1069, as numbered in the above Cas9 reference sequence, or a corresponding amino acid residue in another Cas9 polypeptide. In some embodiments, the deaminase (e.g., adenosine deaminase, cytidine deaminase, or adenosine deaminase and cytidine deaminase) is inserted to replace amino acid residue 1067, or is inserted to replace amino acid residue 1068, or is inserted to replace amino acid residue 1069, as numbered in the above Cas9 reference sequence, or a corresponding amino acid residue in another Cas9 polypeptide.

[0295] In some embodiments, the deaminase (e.g., adenosine deaminase, cytidine deaminase, or adenosine deaminase and cytidine deaminase) is inserted at amino acid residue 1246, or is inserted at amino acid residue 1247, or is inserted at amino acid residue 1248, as numbered in the above Cas9 reference sequence, or a corresponding amino acid residue in another Cas9 polypeptide. In some embodiments, the deaminase (e.g., adenosine deaminase, cytidine deaminase, or adenosine deaminase and cytidine deaminase) is inserted at the N-terminus of amino acid residue 1246 or is inserted at the N-terminus of amino acid residue 1247 or is inserted at the N-terminus of amino acid residue 1248, as numbered in the above Cas9 reference sequence, or a corresponding amino acid residue in another Cas9 polypeptide. In some embodiments, the deaminase (e.g., adenosine deaminase, cytidine deaminase, or adenosine deaminase and cytidine deaminase) is inserted at the C-terminus of amino acid residue 1246 or is inserted at the C-terminus of amino acid residue 1247 or is inserted at the C-terminus of amino acid residue 1248, as numbered in the above Cas9 reference sequence, or a corresponding amino acid residue in another Cas9 polypeptide. In some embodiments, the deaminase (e.g., adenosine deaminase, cytidine deaminase, or adenosine deaminase and cytidine deaminase) is inserted to replace amino acid residue 1246, or is inserted to replace amino acid residue 1247, or is inserted to replace amino acid residue 1248, as numbered in the above Cas9 reference sequence, or a corresponding amino acid residue in another Cas9 polypeptide.

[0296] In some embodiments, a heterologous polypeptide (e.g., deaminase) is inserted in a flexible loop of a Cas9 polypeptide. The flexible loop portions can be selected from the group consisting of 530-537, 569-570, 686-691, 943-947, 1002-1025, 1052-1077, 1232-1247, or 1298-1300 as numbered in the above Cas9 reference sequence, or a corresponding amino acid residue in another Cas9 polypeptide. The flexible loop portions can be selected from the group consisting of: 1-529, 538-568, 580-685, 692-942, 948-1001, 1026-1051, 1078-1231, or 1248-1297 as numbered in the above Cas9 reference sequence, or a corresponding amino acid residue in another Cas9 polypeptide.

[0297] A heterologous polypeptide (e.g., adenine deaminase) can be inserted into a Cas9 polypeptide region corresponding to amino acid residues: 1017-1069, 1242-1247, 1052-1056, 1060-1077, 1002-1003, 943-947, 530-537, 568-579, 686-691, 1242-1247, 1298-1300, 1066-1077, 1052-1056, or 1060-1077 as numbered in the above Cas9 reference sequence, or a corresponding amino acid residue in another Cas9 polypeptide.

[0298] A heterologous polypeptide (e.g., adenine deaminase) can be inserted in place of a deleted region of a Cas9 polypeptide. The deleted region can correspond to an N-terminal or C-terminal portion of the Cas9 polypeptide. In some embodiments, the deleted region corresponds to residues 792-872 as numbered in the above Cas9 reference sequence, or a corresponding amino acid residue in another Cas9 polypeptide. In some embodiments, the deleted region corresponds to residues 792-906 as numbered in the above Cas9 reference sequence, or a corresponding amino acid residue in another Cas9 polypeptide. In some embodiments, the deleted region corresponds to residues 2-791 as numbered in the above Cas9 reference sequence, or a corresponding amino acid residue in another Cas9 polypeptide. In some embodiments, the deleted region corresponds to residues 1017-1069 as numbered in the above Cas9 reference sequence, or corresponding amino acid residues thereof.

[0299] Exemplary internal fusions base editors are provided in Table 3 below:

TABLE 3
Insertion loci in Cas9 proteins

| BE ID | Modification | Other ID |
|---|---|---|
| IBE001 | Cas9 TadA ins 1015 | ISLAY01 |
| IBE002 | Cas9 TadA ins 1022 | ISLAY02 |
| IBE003 | Cas9 TadA ins 1029 | ISLAY03 |
| IBE004 | Cas9 TadA ins 1040 | ISLAY04 |
| IBE005 | Cas9 TadA ins 1068 | ISLAY05 |
| IBE006 | Cas9 TadA ins 1247 | ISLAY06 |
| IBE007 | Cas9 TadA ins 1054 | ISLAY07 |
| IBE008 | Cas9 TadA ins 1026 | ISLAY08 |
| IBE009 | Cas9 TadA ins 768 | ISLAY09 |
| IBE020 | delta HNH TadA 792 | ISLAY20 |
| IBE021 | N-term fusion single TadA helix truncated 165-end | ISLAY21 |
| IBE029 | TadA-Circular Permutant116 ins1067 | ISLAY29 |
| IBE031 | TadA- Circular Permutant 136 ins1248 | ISLAY31 |
| IBE032 | TadA- Circular Permutant 136ins 1052 | ISLAY32 |
| IBE035 | delta 792-872 TadA ins | ISLAY35 |
| IBE036 | delta 792-906 TadA ins | ISLAY36 |
| IBE043 | TadA-Circular Permutant 65 ins1246 | ISLAY43 |
| IBE044 | TadA ins C-term truncate2 791 | ISLAY44 |

[0300] A heterologous polypeptide (e.g., deaminase) can be inserted within a structural or functional domain of a Cas9 polypeptide. A heterologous polypeptide (e.g., deaminase) can be inserted between two structural or functional domains of a Cas9 polypeptide. A heterologous polypeptide (e.g., deaminase) can be inserted in place of a structural or functional domain of a Cas9 polypeptide, for example, after deleting the domain from the Cas9 polypeptide. The structural or functional domains of a Cas9 polypeptide can include, for example, RuvC I, RuvC II, RuvC III, Red1, Rec2, PI, or HNH.

[0301] In some embodiments, the Cas9 polypeptide lacks one or more domains selected from the group consisting of: RuvC I, RuvC II, RuvC III, Red1, Rec2, PI, or HNH domain. In some embodiments, the Cas9 polypeptide lacks a nuclease domain. In some embodiments, the Cas9 polypeptide lacks an HNH domain. In some embodiments, the Cas9 polypeptide lacks a portion of the HNH domain such that the Cas9 polypeptide has reduced or abolished HNH activity. In some embodiments, the Cas9 polypeptide comprises a deletion of the nuclease domain, and the deaminase is inserted to replace the nuclease domain. In some embodiments, the HNH domain is deleted and the deaminase is inserted in its place. In some embodiments, one or more of the RuvC domains is deleted and the deaminase is inserted in its place.

[0302] A fusion protein comprising a heterologous polypeptide can be flanked by a N-terminal and a C-terminal fragment of a napDNAbp. In some embodiments, the fusion protein comprises a deaminase flanked by a N-terminal fragment and a C-terminal fragment of a Cas9 polypeptide. The N terminal fragment or the C terminal fragment can bind the target polynucleotide sequence. The C-terminus of the N terminal fragment or the N-terminus of the C terminal fragment can comprise a part of a flexible loop of a Cas9 polypeptide. The C-terminus of the N terminal fragment or the N-terminus of the C terminal fragment can comprise a part of an alpha-helix structure of the Cas9 polypeptide. The N-terminal fragment or the C-terminal fragment can comprise a DNA binding domain. The N-terminal fragment or the C-terminal fragment can comprise a RuvC domain. The N-terminal fragment or the C-terminal fragment can comprise an HNH domain. In some embodiments, neither of the N-terminal fragment and the C-terminal fragment comprises an HNH domain.

[0303] In some embodiments, the C-terminus of the N terminal Cas9 fragment comprises an amino acid that is in proximity to a target nucleobase when the fusion protein deaminates the target nucleobase. In some embodiments, the N-terminus of the C terminal Cas9 fragment comprises an amino acid that is in proximity to a target nucleobase when the fusion protein deaminates the target nucleobase. The insertion location of different deaminases can be different in order to have proximity between the target nucleobase and an amino acid in the C-terminus of the N terminal Cas9 fragment or the N-terminus of the C terminal Cas9 fragment. For example, the insertion position of a deaminase can be at an amino acid residue selected from the group consisting of: 1015, 1022, 1029, 1040, 1068, 1247, 1054, 1026, 768, 1067, 1248, 1052, and 1246 as numbered in the above Cas9 reference sequence, or a corresponding amino acid residue in another Cas9 polypeptide.

[0304] The N-terminal Cas9 fragment of a fusion protein (i.e. the N-terminal Cas9 fragment flanking the deaminase in a fusion protein) can comprise the N-terminus of a Cas9 polypeptide. The N-terminal Cas9 fragment of a fusion protein can comprise a length of at least about: 100, 200, 300, 400, 500, 600, 700, 800, 900, 1000, 1100, 1200, or 1300 amino acids. The N-terminal Cas9 fragment of a fusion protein can comprise a sequence corresponding to amino acid residues: 1-56, 1-95, 1-200, 1-300, 1-400, 1-500, 1-600, 1-700, 1-718, 1-765, 1-780, 1-906, 1-918, or 1-1100 as numbered in the above Cas9 reference sequence, or a corresponding amino acid residue in another Cas9 polypeptide. The N-terminal Cas9 fragment can comprise a sequence comprising at least: 85%, at least 90%, at least 91%, at least 92%, at least 93%, at least 94%, at least 95%, at least 96%, at least 97%, at least 98%, at least 99%, or at least 99.5% sequence identity to amino acid residues: 1-56, 1-95, 1-200, 1-300, 1-400, 1-500, 1-600, 1-700, 1-718, 1-765, 1-780, 1-906, 1-918, or 1-1100 as numbered in the above Cas9 reference sequence, or a corresponding amino acid residue in another Cas9 polypeptide.

[0305] The C-terminal Cas9 fragment of a fusion protein (i.e. the C-terminal Cas9 fragment flanking the deaminase in a fusion protein) can comprise the C-terminus of a Cas9 polypeptide. The C-terminal Cas9 fragment of a fusion protein can comprise a length of at least about: 100, 200, 300, 400, 500, 600, 700, 800, 900, 1000, 1100, 1200, or 1300 amino acids. The C-terminal Cas9 fragment of a fusion protein can comprise a sequence corresponding to amino acid residues: 1099-1368, 918-1368, 906-1368, 780-1368, 765-1368, 718-1368, 94-1368, or 56-1368 as numbered in the above Cas9 reference sequence, or a corresponding amino acid residue in another Cas9 polypeptide. The N-terminal Cas9 fragment can comprise a sequence comprising at least: 85%, at least 90%, at least 91%, at least 92%, at least 93%, at least 94%, at least 95%, at least 96%, at least 97%, at least 98%, at least 99%, or at least 99.5% sequence identity to amino acid residues: 1099-1368, 918-1368, 906-1368, 780-1368, 765-1368, 718-1368, 94-1368, or 56-1368 as numbered in the above Cas9 reference sequence, or a corresponding amino acid residue in another Cas9 polypeptide.

[0306] The N-terminal Cas9 fragment and C-terminal Cas9 fragment of a fusion protein taken together may not correspond to a full-length naturally occurring Cas9 polypeptide sequence, for example, as set forth in the above Cas9 reference sequence.

[0307] The fusion protein described herein can affect targeted deamination with reduced deamination at non-target sites (e.g., off-target sites), such as reduced genome wide spurious deamination. The fusion protein described herein can affect targeted deamination with reduced bystander deamination at non-target sites. The undesired deamination or off-target deamination can be reduced by at least 30%, at least 40%, at least 50%, at least 60%, at least 70%, at least 80%, at least 90%, at least 95%, or at least 99% compared with, for example, an end terminus fusion protein comprising the deaminase fused to a N terminus or a C terminus of a Cas9 polypeptide. The undesired deamination or off-target deamination can be reduced by at least one-fold, at least two-fold, at least three-fold, at least four-fold, at least five-fold, at least tenfold, at least fifteen fold, at least twenty fold, at least thirty fold, at least forty fold, at least fifty fold, at least 60 fold, at least 70 fold, at least 80 fold, at least 90 fold, or at least hundred fold, compared with, for example, an end terminus fusion protein comprising the deaminase fused to a N terminus or a C terminus of a Cas9 polypeptide.

[0308] In some embodiments, the deaminase (e.g., adenosine deaminase, cytidine deaminase, or adenosine deaminase and cytidine deaminase) of the fusion protein deaminates no more than two nucleobases within the range of an R-loop. In some embodiments, the deaminase of the fusion protein deaminates no more than three nucleobases within the range of the R-loop. In some embodiments, the deaminase of the fusion protein deaminates no more than 2, 3, 4, 5, 6, 7, 8, 9, or 10 nucleobases within the range of the R-loop. An R-loop is a three-stranded nucleic acid structure including a DNA:RNA hybrid, a DNA:DNA or an RNA: RNA complementary structure and the associated with single-stranded DNA. As used herein, an R-loop may be formed when a target polynucleotide is contacted with a CRISPR complex or a base editing complex, wherein a portion of a guide polynucleotide, e.g. a guide RNA, hybridizes with and displaces with a portion of a target polynucleotide, e.g. a target DNA. In some embodiments, an R-loop comprises a hybridized region of a spacer sequence and a target DNA complementary sequence. An R-loop region may be of about 5, 6, 7, 8, 9, 10, 11, 12, 13, 14, 15, 16, 17, 18, 19, 20, 21, 22, 23, 24, 25, 26, 27, 28, 29, 30, 31, 32, 33, 34, 35, 36, 37, 38, 39, 40, 41, 42, 43, 44, 45, 46, 47, 48, 49, or 50 nucleobase pairs in length. In some embodiments, the R-loop region is about 20 nucleobase pairs in length. It should be understood that, as used herein, an R-loop region is not limited to the target DNA strand that hybridizes with the guide polynucleotide. For example, editing of a target nucleobase within an R-loop region may be to a DNA strand that comprises the complementary strand to a guide RNA, or may be to a DNA strand that is the opposing strand of the strand complementary to the guide RNA. In some embodiments, editing in the region of the R-loop comprises editing a nucleobase on non-complementary strand (protospacer strand) to a guide RNA in a target DNA sequence.

[0309] The fusion protein described herein can affect target deamination in an editing window different from canonical base editing. In some embodiments, a target nucleobase is from about 1 to about 20 bases upstream of a PAM sequence in the target polynucleotide sequence. In some embodiments, a target nucleobase is from about 2 to about 12 bases upstream of a PAM sequence in the target polynucleotide sequence. In some embodiments, a target nucleobase is from about 1 to 9 base pairs, about 2 to 10 base pairs, about 3 to 11 base pairs, about 4 to 12 base pairs, about 5 to 13 base pairs, about 6 to 14 base pairs, about 7 to 15 base pairs, about 8 to 16 base pairs, about 9 to 17 base pairs, about 10 to 18 base pairs, about 11 to 19 base pairs, about 12 to 20 base pairs, about 1 to 7 base pairs, about 2 to 8 base pairs, about 3 to 9 base pairs, about 4 to 10 base pairs, about 5 to 11 base pairs, about 6 to 12 base pairs, about 7 to 13 base pairs, about 8 to 14 base pairs, about 9 to 15 base pairs, about 10 to 16 base pairs, about 11 to 17 base pairs, about 12 to 18 base pairs, about 13 to 19 base pairs, about 14 to 20 base pairs, about 1 to 5 base pairs, about 2 to 6 base pairs, about 3 to 7 base pairs, about 4 to 8 base pairs, about 5 to 9 base pairs, about 6 to 10 base pairs, about 7 to 11 base pairs, about 8 to 12 base pairs, about 9 to 13 base pairs, about 10 to 14 base pairs, about 11 to 15 base pairs, about 12 to 16 base pairs, about 13 to 17 base pairs, about 14 to 18 base pairs, about 15 to 19 base pairs, about 16 to 20 base pairs, about 1 to 3 base pairs, about 2 to 4 base pairs, about 3 to 5 base pairs, about 4 to 6 base pairs, about 5 to 7 base pairs, about 6 to 8 base pairs, about 7 to 9 base pairs, about 8 to 10 base pairs, about 9 to 11 base pairs, about 10 to 12 base pairs, about 11 to 13 base pairs, about 12 to 14 base pairs, about 13 to 15 base pairs, about 14 to 16 base pairs, about 15 to 17 base pairs, about 16 to 18 base pairs, about 17 to 19 base pairs, about 18 to 20 base pairs away or upstream of the PAM sequence. In some embodiments, a target nucleobase is about 1, 2, 3, 4, 5, 6, 7, 8, 9, 10, 11, 12, 13, 14, 15, 16, 17, 18, 19, 20, or more base pairs away from or upstream of the PAM sequence. In some embodiments, a target nucleobase is about 1, 2, 3, 4, 5, 6, 7, 8, or 9 base pairs upstream of the PAM sequence. In some embodiments, a target nucleobase is about 2, 3, 4, or 6 base pairs upstream of the PAM sequence.

[0310] The fusion protein can comprise more than one heterologous polypeptide. For example, the fusion protein can additionally comprise one or more UGI domains and/or one or more nuclear localization signals. The two or more heterologous domains can be inserted in tandem. The two or more heterologous domains can be inserted at locations such that they are not in tandem in the NapDNAbp.

[0311] A fusion protein can comprise a linker between the deaminase and the napDNAbp polypeptide. The linker can be a peptide or a non-peptide linker. For example, the linker can be an XTEN, (GGGS)n (SEQ ID NO: 1308), (GGGGS)n (SEQ ID NO: 109), (G)n, (EAAAK)n (SEQ ID NO: 1309), (GGS)n, SGSETPGTSESATPES (SEQ ID NO: 56). In some embodiments, the fusion protein comprises a linker between the N-terminal Cas9 fragment and the deaminase. In some embodiments, the fusion protein comprises a linker between the C-terminal Cas9 fragment and the deaminase. In some embodiments, the N-terminal and C-terminal fragments of napDNAbp are connected to the deaminase with a linker. In some embodiments, the N-terminal and C-terminal fragments are joined to the deaminase domain without a linker. In some embodiments, the fusion protein comprises a linker between the N-terminal Cas9 fragment and the deaminase, but does not comprise a linker between the C-terminal Cas9 fragment and the deaminase. In some embodiments, the fusion protein comprises a linker between the C-terminal Cas9 fragment and the deaminase, but does not comprise a linker between the N-terminal Cas9 fragment and the deaminase.

[0312] In some embodiments, the napDNAbp in the fusion protein is a Cas12 polypeptide, e.g., Cas12b/C2c1, or a fragment thereof. The Cas12 polypeptide can be a variant Cas12 polypeptide. In other embodiments, the N- or C-terminal fragments of the Cas12 polypeptide comprise a nucleic acid programmable DNA binding domain or a RuvC domain. In other embodiments, the fusion protein contains a linker between the Cas12 polypeptide and the catalytic domain. In other embodiments, the amino acid sequence of the linker is GGSGGS (SEQ ID NO: 273) or GSSGSETPGTSESATPESSG (SEQ ID NO: 1310). In other embodiments, the linker is a rigid linker. In other embodiments of the above aspects, the linker is encoded by GGAGGCTCTGGAGGAAGC (SEQ ID NO: 1311) or GGCTCTTCTGGATCTGAAACACCTGGCACAAGCGAGAGCGCCACCCCTGAGAGCTCTGGC (SEQ ID NO: 1312).

[0313] Fusion proteins comprising a heterologous catalytic domain flanked by N- and C-terminal fragments of a Cas12 polypeptide are also useful for base editing in the methods as described herein. Fusion proteins comprising Cas12 and one or more deaminase domains, e.g., adenosine deaminase, or comprising an adenosine deaminase domain flanked by Cas12 sequences are also useful for highly specific and efficient base editing of target sequences. In an embodiment, a chimeric Cas12 fusion protein contains a heterologous catalytic domain (e.g., adenosine deaminase, cytidine deaminase, or adenosine deaminase and cytidine deaminase) inserted within a Cas12 polypeptide. In some embodiments, the fusion protein comprises an adenosine deaminase domain and a cytidine deaminase domain inserted within a Cas12. In some embodiments, an adenosine deaminase is fused within Cas12 and a cytidine deaminase is fused to the C-terminus. In some embodiments, an adenosine deaminase is fused within Cas12 and a cytidine deaminase fused to the N-terminus. In some embodiments, a cytidine deaminase is fused within Cas12 and an adenosine deaminase is fused to the C-terminus. In some embodiments, a cytidine deaminase is fused within Cas12 and an adenosine deaminase fused to the N-terminus. Exemplary structures of a fusion protein with an adenosine deaminase and a cytidine deaminase and a Cas12 are provided as follows:

[0314] NH2-[Cas12(adenosine deaminase)]-[cytidine deaminase]-COOH;

[0315] NH2-[cytidine deaminase]-[Cas12(adenosine deaminase)]-COOH;

[0316] NH2-[Cas12(cytidine deaminase)]-[adenosine deaminase]-COOH; or

[0317] NH2-[adenosine deaminase]-[Cas12(cytidine deaminase)]-COOH;

[0318] In some embodiments, the “-” used in the general architecture above indicates the presence of an optional linker.

[0319] In various embodiments, the catalytic domain has DNA modifying activity (e.g., deaminase activity), such as adenosine deaminase activity. In some embodiments, the adenosine deaminase is a TadA (e.g., TadA*7.10). In some embodiments, the TadA is a TadA*8. In some embodiments, a TadA*8 is fused within Cas12 and a cytidine deaminase is fused to the C-terminus. In some embodiments, a TadA*8 is fused within Cas12 and a cytidine deaminase fused to the N-terminus. In some embodiments, a cytidine deaminase is fused within Cas12 and a TadA*8 is fused to the C-terminus. In some embodiments, a cytidine deaminase is fused within Cas12 and a TadA*8 fused to the N-terminus. Exemplary structures of a fusion protein with a TadA*8 and a cytidine deaminase and a Cas12 are provided as follows:

[0320] N-[Cas12(TadA*8)]-[cytidine deaminase]-C;

[0321] N-[cytidine deaminase]-[Cas12(TadA*8)]-C;

[0322] N-[Cas12(cytidine deaminase)]-[TadA*8]-C; or

[0323] N-[TadA*8]-[Cas12(cytidine deaminase)]-C.

[0324] In some embodiments, the “-” used in the general architecture above indicates the presence of an optional linker.

[0325] In other embodiments, the fusion protein contains one or more catalytic domains. In other embodiments, at least one of the one or more catalytic domains is inserted within the Cas12 polypeptide or is fused at the Cas12 N-terminus or C-terminus. In other embodiments, at least one of the one or more catalytic domains is inserted within a loop, an alpha helix region, an unstructured portion, or a solvent accessible portion of the Cas12 polypeptide. In other embodiments, the Cas12 polypeptide is Cas12a, Cas12b, Cas12c, Cas12d, Cas12e, Cas12g, Cas12h, Cas12i, or Cas12j/CasΦ. In other embodiments, the Cas12 polypeptide has at least about 85% amino acid sequence identity to Bacillus hisashii Cas12b, Bacillus thermoamylovorans Cas12b, Bacillus sp. V3-13 Cas12b, or Alicyclobacillus acidiphilus Cas12b (SEQ ID NO: 259). In other embodiments, the Cas12 polypeptide has at least about 90% amino acid sequence identity to Bacillus hisashii Cas12b (SEQ ID NO: 260), Bacillus thermoamylovorans Cas12b, Bacillus sp. V3-13 Cas12b, or Alicyclobacillus acidiphilus Cas12b. In other embodiments, the Cas12 polypeptide has at least about 95% amino acid sequence identity to Bacillus hisashii Cas12b, Bacillus thermoamylovorans Cas12b (SEQ ID NO: 265), Bacillus sp. V3-13 Cas12b (SEQ ID NO: 264), or Alicyclobacillus acidiphilus Cas12b. In other embodiments, the Cas12 polypeptide contains or consists essentially of a fragment of Bacillus hisashii Cas12b, Bacillus thermoamylovorans Cas12b, Bacillus sp. V3-13 Cas12b, or Alicyclobacillus acidiphilus Cas12b. In embodiments, the Cas12 polypeptide contains BvCas12b (V4), which in some embodiments is expressed as 5′ mRNA Cap---5′ UTR---bhCas12b---STOP sequence ---3′ UTR ---120polyA tail (SEQ ID NOs: 261-263).

[0326] In other embodiments, the catalytic domain is inserted between amino acid positions 153-154, 255-256, 306-307, 980-981, 1019-1020, 534-535, 604-605, or 344-345 of BhCas12b or a corresponding amino acid residue of Cas12a, Cas12c, Cas12d, Cas12e, Cas12g, Cas12h, Cas12i, or Cas12j/CasΦ. In other embodiments, the catalytic domain is inserted between amino acids P153 and S154 of BhCas12b. In other embodiments, the catalytic domain is inserted between amino acids K255 and E256 of BhCas12b. In other embodiments, the catalytic domain is inserted between amino acids D980 and G981 of BhCas12b. In other embodiments, the catalytic domain is inserted between amino acids K1019 and L1020 of BhCas12b. In other embodiments, the catalytic domain is inserted between amino acids F534 and P535 of BhCas12b. In other embodiments, the catalytic domain is inserted between amino acids K604 and G605 of BhCas12b. In other embodiments, the catalytic domain is inserted between amino acids H344 and F345 of BhCas12b. In other embodiments, catalytic domain is inserted between amino acid positions 147 and 148, 248 and 249, 299 and 300, 991 and 992, or 1031 and 1032 of BvCas12b or a corresponding amino acid residue of Cas12a, Cas12c, Cas12d, Cas12e, Cas12g, Cas12h, Cas12i, or Cas12j/CasΦ. In other embodiments, the catalytic domain is inserted between amino acids P147 and D148 of BvCas12b. In other embodiments, the catalytic domain is inserted between amino acids G248 and G249 of BvCas12b. In other embodiments, the catalytic domain is inserted between amino acids P299 and E300 of BvCas12b. In other embodiments, the catalytic domain is inserted between amino acids G991 and E992 of BvCas12b. In other embodiments, the catalytic domain is inserted between amino acids K1031 and M1032 of BvCas12b. In other embodiments, the catalytic domain is inserted between amino acid positions 157 and 158, 258 and 259, 310 and 311, 1008 and 1009, or 1044 and 1045 of AaCas12b or a corresponding amino acid residue of Cas12a, Cas12c, Cas12d, Cas12e, Cas12g, Cas12h, Cas12i, or Cas12j/CasΦ. In other embodiments, the catalytic domain is inserted between amino acids P157 and G158 of AaCas12b. In other embodiments, the catalytic domain is inserted between amino acids V258 and G259 of AaCas12b. In other embodiments, the catalytic domain is inserted between amino acids D310 and P311 of AaCas12b. In other embodiments, the catalytic domain is inserted between amino acids G1008 and E1009 of AaCas12b. In other embodiments, the catalytic domain is inserted between amino acids G1044 and K1045 at of AaCas12b.

[0327] In other embodiments, the fusion protein contains a nuclear localization signal (e.g., a bipartite nuclear localization signal). In other embodiments, the amino acid sequence of the nuclear localization signal is MAPKKKRKVGIHGVPAA (SEQ ID NO: 1313). In other embodiments of the above aspects, the nuclear localization signal is encoded by the following sequence:

[0328] ATGGCCCCAAAGAAGAAGCGGAAGGTCGGTATCCACGGAGTCCCAGCAGCC (SEQ ID NO: 1314). In other embodiments, the Cas12b polypeptide contains a mutation that silences the catalytic activity of a RuvC domain. In other embodiments, the Cas12b polypeptide contains D574A, D829A and/or D952A mutations. In other embodiments, the fusion protein further contains a tag (e.g., an influenza hemagglutinin tag).

[0329] In some embodiments, the fusion protein comprises a napDNAbp domain (e.g., Cas12-derived domain) with an internally fused nucleobase editing domain (e.g., all or a portion of a deaminase domain, e.g., an adenosine deaminase domain). In some embodiments, the napDNAbp is a Cas12b. In some embodiments, the base editor comprises a BhCas12b domain with an internally fused TadA*8 domain inserted at the loci provided in Table 4 below.

TABLE 4
Insertion loci in Cas12b proteins

| | | Inserted |
|---|---|---|
| | Insertion site | between aa |
| BhCas12b | | |
| position 1 | 153 | PS |
| position 2 | 255 | KE |
| position 3 | 306 | DE |
| position 4 | 980 | DG |
| position 5 | 1019 | KL |
| position 6 | 534 | FP |
| position 7 | 604 | KG |
| position 8 | 344 | HF |
| BvCas12b | | |
| position 1 | 147 | PD |
| position 2 | 248 | GG |
| position 3 | 299 | PE |
| position 4 | 991 | GE |
| position 5 | 1031 | KM |
| AaCas12b | | |
| position 1 | 157 | PG |
| position 2 | 258 | VG |
| position 3 | 310 | DP |
| position 4 | 1008 | GE |
| position 5 | 1044 | GK |

[0330] By way of nonlimiting example, an adenosine deaminase (e.g., TadA*8.13) may be inserted into a BhCas12b to produce a fusion protein (e.g., TadA*8.13-BhCas12b) that effectively edits a nucleic acid sequence.

[0331] In some embodiments, the base editing system described herein is an ABE with TadA inserted into a Cas9. Polypeptide sequences of relevant ABEs with TadA inserted into a Cas9 are provided in the attached Sequence Listing as SEQ ID NOs: 1315-1360.

[0332] In some embodiments, adenosine deaminase base editors were generated to insert TadA or variants thereof into the Cas9 polypeptide at the identified positions.

[0333] Exemplary, yet nonlimiting, fusion proteins are described in International PCT Application Nos. PCT/US2020/016285 and U.S. Provisional Application Nos. 62/852,228 and 62/852,224, the contents of which are incorporated by reference herein in their entireties.

### A to G Editing

[0334] In some embodiments, a base editor described herein comprises an adenosine deaminase domain. Such an adenosine deaminase domain of a base editor can facilitate the editing of an adenine (A) nucleobase to a guanine (G) nucleobase by deaminating the A to form inosine (I), which exhibits base pairing properties of G. Adenosine deaminase is capable of deaminating (i.e., removing an amine group) adenine of a deoxyadenosine residue in deoxyribonucleic acid (DNA). In some embodiments, an A-to-G base editor further comprises an inhibitor of inosine base excision repair, for example, an uracil glycosylase inhibitor (UGI) domain or a catalytically inactive inosine specific nuclease. Without wishing to be bound by any particular theory, the UGI domain or catalytically inactive inosine specific nuclease can inhibit or prevent base excision repair of a deaminated adenosine residue (e.g., inosine), which can improve the activity or efficiency of the base editor.

[0335] A base editor comprising an adenosine deaminase can act on any polynucleotide, including DNA, RNA and DNA-RNA hybrids. In certain embodiments, a base editor comprising an adenosine deaminase can deaminate a target A of a polynucleotide comprising RNA. For example, the base editor can comprise an adenosine deaminase domain capable of deaminating a target A of an RNA polynucleotide and/or a DNA-RNA hybrid polynucleotide. In an embodiment, an adenosine deaminase incorporated into a base editor comprises all or a portion of adenosine deaminase acting on RNA (ADAR, e.g., ADAR1 or ADAR2) or tRNA (ADAT). A base editor comprising an adenosine deaminase domain can also be capable of deaminating an A nucleobase of a DNA polynucleotide. In an embodiment an adenosine deaminase domain of a base editor comprises all or a portion of an ADAT comprising one or more mutations which permit the ADAT to deaminate a target A in DNA. For example, the base editor can comprise all or a portion of an ADAT from Escherichia coli (EcTadA) comprising one or more of the following mutations: D108N, A106V, D147Y, E155V, L84F, H123Y, I156F, or a corresponding mutation in another adenosine deaminase. Exemplary ADAT homolog polypeptide sequences are provided in the Sequence Listing as SEQ ID NOs: 1363-1370.

[0336] The adenosine deaminase can be derived from any suitable organism (e.g., E. coli). In some embodiments, the adenosine deaminase is from a prokaryote. In some embodiments, the adenosine deaminase is from a bacterium. In some embodiments, the adenosine deaminase is from Escherichia coli, Staphylococcus aureus, Salmonella typhi, Shewanella putrefaciens, Haemophilus influenzae, Caulobacter crescentus, or Bacillus subtilis. In some embodiments, the adenosine deaminase is from E. coli. In some embodiments, the adenine deaminase is a naturally-occurring adenosine deaminase that includes one or more mutations corresponding to any of the mutations provided herein (e.g., mutations in ecTadA). The corresponding residue in any homologous protein can be identified by e.g., sequence alignment and determination of homologous residues. The mutations in any naturally-occurring adenosine deaminase (e.g., having homology to ecTadA) that correspond to any of the mutations described herein (e.g., any of the mutations identified in ecTadA) can be generated accordingly.

[0337] In some embodiments, the adenosine deaminase comprises an amino acid sequence that is at least 60%, at least 65%, at least 70%, at least 75%, at least 80%, at least 85%, at least 90%, at least 95%, at least 96%, at least 97%, at least 98%, at least 99%, or at least 99.5% identical to any one of the amino acid sequences set forth in any of the adenosine deaminases provided herein. It should be appreciated that adenosine deaminases provided herein may include one or more mutations (e.g., any of the mutations provided herein). The disclosure provides any deaminase domains with a certain percent identify plus any of the mutations or combinations thereof described herein. In some embodiments, the adenosine deaminase comprises an amino acid sequence that has 1, 2, 3, 4, 5, 6, 7, 8, 9, 10, 11, 12, 13, 14, 15, 16, 17, 18, 19, 20, 21, 22, 21, 24, 25, 26, 27, 28, 29, 30, 31, 32, 33, 34, 35, 36, 37, 38, 39, 40, 41, 42, 43, 44, 45, 46, 47, 48, 49, 50, or more mutations compared to a reference sequence, or any of the adenosine deaminases provided herein. In some embodiments, the adenosine deaminase comprises an amino acid sequence that has at least 5, at least 10, at least 15, at least 20, at least 25, at least 30, at least 35, at least 40, at least 45, at least 50, at least 60, at least 70, at least 80, at least 90, at least 100, at least 110, at least 120, at least 130, at least 140, at least 150, at least 160, or at least 170 identical contiguous amino acid residues as compared to any one of the amino acid sequences known in the art or described herein.

[0338] It should be appreciated that any of the mutations provided herein (e.g., based on the TadA reference sequence) can be introduced into other adenosine deaminases, such as E. coli TadA (ecTadA), S. aureus TadA (saTadA), or other adenosine deaminases (e.g., bacterial adenosine deaminases). It would be apparent to the skilled artisan that additional deaminases may similarly be aligned to identify homologous amino acid residues that can be mutated as provided herein. Thus, any of the mutations identified in the TadA reference sequence can be made in other adenosine deaminases (e.g., ecTada) that have homologous amino acid residues. It should also be appreciated that any of the mutations provided herein can be made individually or in any combination in the TadA reference sequence or another adenosine deaminase.

[0339] In some embodiments, the adenosine deaminase comprises a D108X mutation in the TadA reference sequence, or a corresponding mutation in another adenosine deaminase, where X indicates any amino acid other than the corresponding amino acid in the wild-type adenosine deaminase. In some embodiments, the adenosine deaminase comprises a D108G, D108N, D108V, D108A, or D108Y mutation in TadA reference sequence, or a corresponding mutation in another adenosine deaminase. It should be appreciated, however, that additional deaminases may similarly be aligned to identify homologous amino acid residues that can be mutated as provided herein.

[0340] In some embodiments, the adenosine deaminase comprises an A106X mutation in TadA reference sequence, or a corresponding mutation in another adenosine deaminase, where X indicates any amino acid other than the corresponding amino acid in the wild-type adenosine deaminase. In some embodiments, the adenosine deaminase comprises an A106V mutation in TadA reference sequence, or a corresponding mutation in another adenosine deaminase (e.g., ecTadA).

[0341] In some embodiments, the adenosine deaminase comprises a E155X mutation in TadA reference sequence, or a corresponding mutation in another adenosine deaminase, where the presence of X indicates any amino acid other than the corresponding amino acid in the wild-type adenosine deaminase. In some embodiments, the adenosine deaminase comprises a E155D, E155G, or E155V mutation in TadA reference sequence, or a corresponding mutation in another adenosine deaminase (e.g., ecTadA).

[0342] In some embodiments, the adenosine deaminase comprises a D147X mutation in TadA reference sequence, or a corresponding mutation in another adenosine deaminase, where the presence of X indicates any amino acid other than the corresponding amino acid in the wild-type adenosine deaminase. In some embodiments, the adenosine deaminase comprises a D147Y, mutation in TadA reference sequence, or a corresponding mutation in another adenosine deaminase (e.g., ecTadA).

[0343] In some embodiments, the adenosine deaminase comprises an A106X, E155X, or D147X, mutation in the TadA reference sequence, or a corresponding mutation in another adenosine deaminase (e.g., ecTadA), where X indicates any amino acid other than the corresponding amino acid in the wild-type adenosine deaminase. In some embodiments, the adenosine deaminase comprises an E155D, E155G, or E155V mutation. In some embodiments, the adenosine deaminase comprises a D147Y.

[0344] It should also be appreciated that any of the mutations provided herein may be made individually or in any combination in ecTadA or another adenosine deaminase. For example, an adenosine deaminase may contain a D108N, a A106V, a E155V, and/or a D147Y mutation in TadA reference sequence, or a corresponding mutation in another adenosine deaminase (e.g., ecTadA). In some embodiments, an adenosine deaminase comprises the following group of mutations (groups of mutations are separated by a “;”) in TadA reference sequence, or corresponding mutations in another adenosine deaminase: D108N and A106V; D108N and E155V; D108N and D147Y; A106V and E155V; A106V and D147Y; E155V and D147Y; D108N, A106V, and E155V; D108N, A106V, and D147Y; D108N, E155V, and D147Y; A106V, E155V, and D147Y; and D108N, A106V, E155V, and D147Y. It should be appreciated, however, that any combination of corresponding mutations provided herein may be made in an adenosine deaminase (e.g., ecTadA).

[0345] In some embodiments, the adenosine deaminase comprises one or more of a H8X, T17X, L18X, W23X, L34X, W45X, R51X, A56X, E59X, E85X, M94X, 195X, V102X, F104X, A106X, R107X, D108X, K110X, M118X, N127X, A138X, F149X, M151X, R153X, Q154X, I156X, and/or K157X mutation in TadA reference sequence, or one or more corresponding mutations in another adenosine deaminase, where the presence of X indicates any amino acid other than the corresponding amino acid in the wild-type adenosine deaminase. In some embodiments, the adenosine deaminase comprises one or more of H8Y, T17S, L18E, W23L, L34S, W45L, R51H, A56E, or A56S, E59G, E85K, or E85G, M94L, 195L, V102A, F104L, A106V, R107C, or R107H, or R107P, D108G, or D108N, or D108V, or D108A, or D108Y, K1101, M118K, N127S, A138V, F149Y, M151V, R153C, Q154L, I156D, and/or K157R mutation in TadA reference sequence, or one or more corresponding mutations in another adenosine deaminase.

[0346] In some embodiments, the adenosine deaminase comprises one or more of a H8X, D108X, and/or N127X mutation in TadA reference sequence, or one or more corresponding mutations in another adenosine deaminase, where X indicates the presence of any amino acid. In some embodiments, the adenosine deaminase comprises one or more of a H8Y, D108N, and/or N127S mutation in TadA reference sequence, or one or more corresponding mutations in another adenosine deaminase.

[0347] In some embodiments, the adenosine deaminase comprises one or more of H8X, R26X, M61X, L68X, M70X, A106X, D108X, A109X, N127X, D147X, R152X, Q154X, E155X, K161X, Q163X, and/or T166X mutation in TadA reference sequence, or one or more corresponding mutations in another adenosine deaminase, where X indicates the presence of any amino acid other than the corresponding amino acid in the wild-type adenosine deaminase. In some embodiments, the adenosine deaminase comprises one or more of H8Y, R26W, M611, L68Q, M70V, A106T, D108N, A109T, N127S, D147Y, R152C, Q154H or Q154R, E155G or E155V or E155D, K161Q, Q163H, and/or T166P mutation in TadA reference sequence, or one or more corresponding mutations in another adenosine deaminase.

[0348] In some embodiments, the adenosine deaminase comprises one, two, three, four, five, or six mutations selected from the group consisting of H8X, D108X, N127X, D147X, R152X, and Q154X in TadA reference sequence, or a corresponding mutation or mutations in another adenosine deaminase (e.g., ecTadA), where X indicates the presence of any amino acid other than the corresponding amino acid in the wild-type adenosine deaminase. In some embodiments, the adenosine deaminase comprises one, two, three, four, five, six, seven, or eight mutations selected from the group consisting of H8X, M61X, M70X, D108X, N127X, Q154X, E155X, and Q163X in TadA reference sequence, or a corresponding mutation or mutations in another adenosine deaminase (e.g., ecTadA), where X indicates the presence of any amino acid other than the corresponding amino acid in the wild-type adenosine deaminase. In some embodiments, the adenosine deaminase comprises one, two, three, four, or five, mutations selected from the group consisting of H8X, D108X, N127X, E155X, and T166X in TadA reference sequence, or a corresponding mutation or mutations in another adenosine deaminase (e.g., ecTadA), where X indicates the presence of any amino acid other than the corresponding amino acid in the wild-type adenosine deaminase.

[0349] In some embodiments, the adenosine deaminase comprises one, two, three, four, five, or six mutations selected from the group consisting of H8X, A106X, and D108X, or a corresponding mutation or mutations in another adenosine deaminase, where X indicates the presence of any amino acid other than the corresponding amino acid in the wild-type adenosine deaminase. In some embodiments, the adenosine deaminase comprises one, two, three, four, five, six, seven, or eight mutations selected from the group consisting of H8X, R26X, L68X, D108X, N127X, D147X, and E155X, or a corresponding mutation or mutations in another adenosine deaminase, where X indicates the presence of any amino acid other than the corresponding amino acid in the wild-type adenosine deaminase.

[0350] In some embodiments, the adenosine deaminase comprises one, two, three, four, five, six, or seven mutations selected from the group consisting of H8X, R126X, L68X, D108X, N127X, D147X, and E155X in TadA reference sequence, or a corresponding mutation or mutations in another adenosine deaminase, where X indicates the presence of any amino acid other than the corresponding amino acid in the wild-type adenosine deaminase. In some embodiments, the adenosine deaminase comprises one, two, three, four, or five mutations selected from the group consisting of H8X, D108X, A109X, N127X, and E155X in TadA reference sequence, or a corresponding mutation or mutations in another adenosine deaminase, where X indicates the presence of any amino acid other than the corresponding amino acid in the wild-type adenosine deaminase.

[0351] In some embodiments, the adenosine deaminase comprises one, two, three, four, five, or six mutations selected from the group consisting of H8Y, D108N, N127S, D147Y, R152C, and Q154H in TadA reference sequence, or a corresponding mutation or mutations in another adenosine deaminase (e.g., ecTadA). In some embodiments, the adenosine deaminase comprises one, two, three, four, five, six, seven, or eight mutations selected from the group consisting of H8Y, M611, M70V, D108N, N127S, Q154R, E155G and Q163H in TadA reference sequence, or a corresponding mutation or mutations in another adenosine deaminase (e.g., ecTadA). In some embodiments, the adenosine deaminase comprises one, two, three, four, or five, mutations selected from the group consisting of H8Y, D108N, N127S, E155V, and T166P in TadA reference sequence, or a corresponding mutation or mutations in another adenosine deaminase (e.g., ecTadA). In some embodiments, the adenosine deaminase comprises one, two, three, four, five, or six mutations selected from the group consisting of H8Y, A106T, D108N, N127S, E155D, and K161Q in TadA reference sequence, or a corresponding mutation or mutations in another adenosine deaminase (e.g., ecTadA). In some embodiments, the adenosine deaminase comprises one, two, three, four, five, six, seven, or eight mutations selected from the group consisting of H8Y, R26W, L68Q, D108N, N127S, D147Y, and E155V in TadA reference sequence, or a corresponding mutation or mutations in another adenosine deaminase (e.g., ecTadA). In some embodiments, the adenosine deaminase comprises one, two, three, four, or five, mutations selected from the group consisting of H8Y, D108N, A109T, N127S, and E155G in TadA reference sequence, or a corresponding mutation or mutations in another adenosine deaminase (e.g., ecTadA).

[0352] In some embodiments, the adenosine deaminase comprises one or more of the or one or more corresponding mutations in another adenosine deaminase. In some embodiments, the adenosine deaminase comprises a D108N, D108G, or D108V mutation in TadA reference sequence, or corresponding mutations in another adenosine deaminase. In some embodiments, the adenosine deaminase comprises a A106V and D108N mutation in TadA reference sequence, or corresponding mutations in another adenosine deaminase. In some embodiments, the adenosine deaminase comprises R107C and D108N mutations in TadA reference sequence, or corresponding mutations in another adenosine deaminase. In some embodiments, the adenosine deaminase comprises a H8Y, D108N, N127S, D147Y, and Q154H mutation in TadA reference sequence, or corresponding mutations in another adenosine deaminase. In some embodiments, the adenosine deaminase comprises a H8Y, D108N, N127S, D147Y, and E155V mutation in TadA reference sequence, or corresponding mutations in another adenosine deaminase. In some embodiments, the adenosine deaminase comprises a D108N, D147Y, and E155V mutation in TadA reference sequence, or corresponding mutations in another adenosine deaminase. In some embodiments, the adenosine deaminase comprises a H8Y, D108N, and N127S mutation in TadA reference sequence, or corresponding mutations in another adenosine deaminase. In some embodiments, the adenosine deaminase comprises a A106V, D108N, D147Y, and E155V mutation in TadA reference sequence, or corresponding mutations in another adenosine deaminase (e.g., ecTadA).

[0353] In some embodiments, the adenosine deaminase comprises one or more of S2X, H8X, 149X, L84X, H123X, N127X, I156X, and/or K160X mutation in TadA reference sequence, or one or more corresponding mutations in another adenosine deaminase, where the presence of X indicates any amino acid other than the corresponding amino acid in the wild-type adenosine deaminase. In some embodiments, the adenosine deaminase comprises one or more of S2A, H8Y, 149F, L84F, H123Y, N127S, I156F, and/or K160S mutation in TadA reference sequence, or one or more corresponding mutations in another adenosine deaminase (e.g., ecTadA).

[0354] In some embodiments, the adenosine deaminase comprises an L84X mutation adenosine deaminase, where X indicates any amino acid other than the corresponding amino acid in the wild-type adenosine deaminase. In some embodiments, the adenosine deaminase comprises an L84F mutation in TadA reference sequence, or a corresponding mutation in another adenosine deaminase (e.g., ecTadA).

[0355] In some embodiments, the adenosine deaminase comprises an H123X mutation in TadA reference sequence, or a corresponding mutation in another adenosine deaminase, where X indicates any amino acid other than the corresponding amino acid in the wild-type adenosine deaminase. In some embodiments, the adenosine deaminase comprises an H123Y mutation in TadA reference sequence, or a corresponding mutation in another adenosine deaminase.

[0356] In some embodiments, the adenosine deaminase comprises an I156X mutation in TadA reference sequence, or a corresponding mutation in another adenosine deaminase, where X indicates any amino acid other than the corresponding amino acid in the wild-type adenosine deaminase. In some embodiments, the adenosine deaminase comprises an I156F mutation in TadA reference sequence, or a corresponding mutation in another adenosine deaminase.

[0357] In some embodiments, the adenosine deaminase comprises one, two, three, four, five, six, or seven mutations selected from the group consisting of L84X, A106X, D108X, H123X, D147X, E155X, and I156X in TadA reference sequence, or a corresponding mutation or mutations in another adenosine deaminase, where X indicates the presence of any amino acid other than the corresponding amino acid in the wild-type adenosine deaminase. In some embodiments, the adenosine deaminase comprises one, two, three, four, five, or six mutations selected from the group consisting of S2X, 149X, A106X, D108X, D147X, and E155X in TadA reference sequence, or a corresponding mutation or mutations in another adenosine deaminase, where X indicates the presence of any amino acid other than the corresponding amino acid in the wild-type adenosine deaminase. In some embodiments, the adenosine deaminase comprises one, two, three, four, or five mutations selected from the group consisting of H8X, A106X, D108X, N127X, and K160X in TadA reference sequence, or a corresponding mutation or mutations in another adenosine deaminase, where X indicates the presence of any amino acid other than the corresponding amino acid in the wild-type adenosine deaminase.

[0358] In some embodiments, the adenosine deaminase comprises one, two, three, four, five, six, or seven mutations selected from the group consisting of L84F, A106V, D108N, H123Y, D147Y, E155V, and I156F in TadA reference sequence, or a corresponding mutation or mutations in another adenosine deaminase. In some embodiments, the adenosine deaminase comprises one, two, three, four, five, or six mutations selected from the group consisting of S2A, 149F, A106V, D108N, D147Y, and E155V in TadA reference sequence.

[0359] In some embodiments, the adenosine deaminase comprises one, two, three, four, or five mutations selected from the group consisting of H8Y, A106T, D108N, N127S, and K160S in TadA reference sequence, or a corresponding mutation or mutations in another adenosine deaminase.

[0360] In some embodiments, the adenosine deaminase comprises one or more of a E25X, R26X, R107X, A142X, and/or A143X mutation in TadA reference sequence, or one or more corresponding mutations in another adenosine deaminase, where the presence of X indicates any amino acid other than the corresponding amino acid in the wild-type adenosine deaminase. In some embodiments, the adenosine deaminase comprises one or more of E25M, E25D, E25A, E25R, E25V, E25S, E25Y, R26G, R26N, R26Q, R26C, R26L, R26K, R107P, R107K, R107A, R107N, R107W, R107H, R107S, A142N, A142D, A142G, A143D, A143G, A143E, A143L, A143W, A143M, A143S, A143Q, and/or A143R mutation in TadA reference sequence, or one or more corresponding mutations in another adenosine deaminase. In some embodiments, the adenosine deaminase comprises one or more of the mutations described herein corresponding to TadA reference sequence, or one or more corresponding mutations in another adenosine deaminase.

[0361] In some embodiments, the adenosine deaminase comprises an E25X mutation in TadA reference sequence, or a corresponding mutation in another adenosine deaminase, where X indicates any amino acid other than the corresponding amino acid in the wild-type adenosine deaminase. In some embodiments, the adenosine deaminase comprises an E25M, E25D, E25A, E25R, E25V, E25S, or E25Y mutation in TadA reference sequence, or a corresponding mutation in another adenosine deaminase (e.g., ecTadA).

[0362] In some embodiments, the adenosine deaminase comprises an R26X mutation in TadA reference sequence, or a corresponding mutation in another adenosine deaminase, where X indicates any amino acid other than the corresponding amino acid in the wild-type adenosine deaminase. In some embodiments, the adenosine deaminase comprises R26G, R26N, R26Q, R26C, R26L, or R26K mutation in TadA reference sequence, or a corresponding mutation in another adenosine deaminase (e.g., ecTadA).

[0363] In some embodiments, the adenosine deaminase comprises an R107X mutation in TadA reference sequence, or a corresponding mutation in another adenosine deaminase, where X indicates any amino acid other than the corresponding amino acid in the wild-type adenosine deaminase. In some embodiments, the adenosine deaminase comprises an R107P, R107K, R107A, R107N, R107W, R107H, or R107S mutation in TadA reference sequence, or a corresponding mutation in another adenosine deaminase (e.g., ecTadA).

[0364] In some embodiments, the adenosine deaminase comprises an A142X mutation in TadA reference sequence, or a corresponding mutation in another adenosine deaminase, where X indicates any amino acid other than the corresponding amino acid in the wild-type adenosine deaminase. In some embodiments, the adenosine deaminase comprises an A142N, A142D, A142G, mutation in TadA reference sequence, or a corresponding mutation in another adenosine deaminase (e.g., ecTadA).

[0365] In some embodiments, the adenosine deaminase comprises an A143X mutation in TadA reference sequence, or a corresponding mutation in another adenosine deaminase, where X indicates any amino acid other than the corresponding amino acid in the wild-type adenosine deaminase. In some embodiments, the adenosine deaminase comprises an A143D, A143G, A143E, A143L, A143W, A143M, A143S, A143Q, and/or A143R mutation in TadA reference sequence, or a corresponding mutation in another adenosine deaminase (e.g., ecTadA).

[0366] In some embodiments, the adenosine deaminase comprises one or more of a H36X, N37X, P48X, 149X, R51X, M70X, N72X, D77X, E134X, S146X, Q154X, K157X, and/or K161X mutation in TadA reference sequence, or one or more corresponding mutations in another adenosine deaminase, where the presence of X indicates any amino acid other than the corresponding amino acid in the wild-type adenosine deaminase. In some embodiments, the adenosine deaminase comprises one or more of H36L, N37T, N37S, P48T, P48L, I49V, R51H, R51L, M70L, N72S, D77G, E134G, S146R, S146C, Q154H, K157N, and/or K161T mutation in TadA reference sequence, or one or more corresponding mutations in another adenosine deaminase (e.g., ecTadA).

[0367] In some embodiments, the adenosine deaminase comprises an H36X mutation in TadA reference sequence, or a corresponding mutation in another adenosine deaminase, where X indicates any amino acid other than the corresponding amino acid in the wild-type adenosine deaminase. In some embodiments, the adenosine deaminase comprises an H36L mutation in TadA reference sequence, or a corresponding mutation in another adenosine deaminase.

[0368] In some embodiments, the adenosine deaminase comprises an N37X mutation in TadA reference sequence, or a corresponding mutation in another adenosine deaminase, where X indicates any amino acid other than the corresponding amino acid in the wild-type adenosine deaminase. In some embodiments, the adenosine deaminase comprises an N37T or N37S mutation in TadA reference sequence, or a corresponding mutation in another adenosine deaminase.

[0369] In some embodiments, the adenosine deaminase comprises an P48X mutation in TadA reference sequence, or a corresponding mutation in another adenosine deaminase, where X indicates any amino acid other than the corresponding amino acid in the wild-type adenosine deaminase. In some embodiments, the adenosine deaminase comprises an P48T or P48L mutation in TadA reference sequence, or a corresponding mutation in another adenosine deaminase.

[0370] In some embodiments, the adenosine deaminase comprises an R51X mutation in TadA reference sequence, or a corresponding mutation in another adenosine deaminase, where X indicates any amino acid other than the corresponding amino acid in the wild-type adenosine deaminase. In some embodiments, the adenosine deaminase comprises an R51H or R51L mutation in TadA reference sequence, or a corresponding mutation in another adenosine deaminase.

[0371] In some embodiments, the adenosine deaminase comprises an S146X mutation in TadA reference sequence, or a corresponding mutation in another adenosine deaminase, where X indicates any amino acid other than the corresponding amino acid in the wild-type adenosine deaminase. In some embodiments, the adenosine deaminase comprises an S146R or S146C mutation in TadA reference sequence, or a corresponding mutation in another adenosine deaminase.

[0372] In some embodiments, the adenosine deaminase comprises an K157X mutation in TadA reference sequence, or a corresponding mutation in another adenosine deaminase, where X indicates any amino acid other than the corresponding amino acid in the wild-type adenosine deaminase. In some embodiments, the adenosine deaminase comprises a K157N mutation in TadA reference sequence, or a corresponding mutation in another adenosine deaminase.

[0373] In some embodiments, the adenosine deaminase comprises an P48X mutation in TadA reference sequence, or a corresponding mutation in another adenosine deaminase, where X indicates any amino acid other than the corresponding amino acid in the wild-type adenosine deaminase. In some embodiments, the adenosine deaminase comprises a P48S, P48T, or P48A mutation in TadA reference sequence, or a corresponding mutation in another adenosine deaminase.

[0374] In some embodiments, the adenosine deaminase comprises an A142X mutation in TadA reference sequence, or a corresponding mutation in another adenosine deaminase, where X indicates any amino acid other than the corresponding amino acid in the wild-type adenosine deaminase. In some embodiments, the adenosine deaminase comprises a A142N mutation in TadA reference sequence, or a corresponding mutation in another adenosine deaminase.

[0375] In some embodiments, the adenosine deaminase comprises an W23X mutation in TadA reference sequence, or a corresponding mutation in another adenosine deaminase, where X indicates any amino acid other than the corresponding amino acid in the wild-type adenosine deaminase. In some embodiments, the adenosine deaminase comprises a W23R or W23L mutation in TadA reference sequence, or a corresponding mutation in another adenosine deaminase.

[0376] In some embodiments, the adenosine deaminase comprises an R152X mutation in TadA reference sequence, or a corresponding mutation in another adenosine deaminase, where X indicates any amino acid other than the corresponding amino acid in the wild-type adenosine deaminase. In some embodiments, the adenosine deaminase comprises a R152P or R52H mutation in TadA reference sequence, or a corresponding mutation in another adenosine deaminase.

[0377] In one embodiment, the adenosine deaminase may comprise the mutations H36L, R51L, L84F, A106V, D108N, H123Y, S146C, D147Y, E155V, I156F, and K157N. In some embodiments, the adenosine deaminase comprises the following combination of mutations relative to TadA reference sequence, where each mutation of a combination is separated by a and each combination of mutations is between parentheses:

### (A106V_D108N),

### (R107C_D108N),

### (H8Y_D108N_N127S_D147Y_Q154H),

### (H8Y_D108N_N127S_D147Y_E155V),

### (D108N_D147Y_E155V),

### (H8Y_D108N_N127S),

### (H8Y_D108N_N127S_D147Y_Q154H),

### (A106V_D108N_D147Y_E155V),

### (D108Q_D147Y_E155V),

### (D108M_D147Y_E155V),

### (D108L_D147Y_E155V),

### (D108K_D147Y_E155V),

### (D1081_D147Y_E155V),

### (D108F_D147Y_E155V),

### (A106V_D108N_D147Y),

### (A106V_D108M_D147Y_E155V),

### (E59A_A106V_D108N_D147Y_E155V),

[0378] (E59A cat dead_A106V_D108N_D147Y_E155V),

### (L84F_A106V_D108N_H123Y_D147Y_E155V_I156Y),

### (L84F_A106V_D108N_H123Y_D147Y_E155V_I156F),

### (D103A_D104N),

### (G22P_D103A_D104N),

### (D103A_D104N_S138A),

### (R26G_L84F_A106V_R107H_D108N_H123Y_A142N_A143D_D147Y_E155V_I156F),

### (E25G_R26G_L84F_A106V_R107H_D108N_H123Y_A142N_A143D_D147Y_E155V_I156F),

### (E25D_R26G_L84F_A106V_R107K_D108N_H123Y_A142N_A143G_D147Y_E155V_I156F),

### (R26Q_L84F_A106V_D108N_H123Y_A142N_D147Y_E155V_I156F),

### (E25M_R26G_L84F_A106V_R107P_D108N_H123Y_A142N_A143D_D147Y_E155V_I156F),

### (R26C_L84F_A106V_R107H_D108N_H123Y_A142N_D147Y_E155V_I156F),

### (L84F_A106V_D108N_H123Y_A142N_A143L_D147Y_E155V_I156F),

### (R26G_L84F_A106V_D108N_H123Y_A142N_D147Y_E155V_I156F),

### (E25A_R26G_L84F_A106V_R107N_D108N_H123Y_A142N_A143E_D147Y_E155V_I156F),

### (R26G_L84F_A106V_R107H_D108N_H123Y_A142N_A143D_D147Y_E155V_I156F),

### (A106V_D108N_A142N_D147Y_E155V),

### (R26G_A106V_D108N_A142N_D147Y_E155V),

### (E25D_R26G_A106V_R107K_D108N_A142N_A143G_D147Y_E155V),

### (R26G_A106V_D108N_R107H_A142N_A143D_D147Y_E155V),

### (E25D_R26G_A106V_D108N_A142N_D147Y_E155V),

### (A106V_R107K_D108N_A142N_D147Y_E155V),

### (A106V_D108N_A142N_A143G_D147Y_E155V),

### (A106V_D108N_A142N_A143L_D147Y_E155V),

### (H36L_R51L_L84F_A106V_D108N_H123Y_S146C_D147Y_E155V_I156F_K157N),

### (N37T_P48T_M70L_L84F_A106V_D108N_H123Y_D147Y_I49V E155V_I156F),

### (N37S_L84F_A106V_D108N_H123Y_D147Y_E155V_I156F_K161T),

### (H36L_L84F_A106V_D108N_H123Y_D147Y_Q154H_E155V_I156F),

### (N72S_L84F_A106V_D108N_H123Y_S146R_D147Y_E155V_I156F),

### (H36L_P48L_L84F_A106V_D108N_H123Y_E134G_D147Y_E155V_I156F),

### (H36L_L84F_A106V_D108N_H123Y_D147Y_E155V_I156F_K157N)

### (H36L_L84F_A106V_D108N_H123Y_S146C_D147Y_E155V_I156F),

### (L84F_A106V_D108N_H123Y_S146R_D147Y_E155V_I156F_K161T),

### (N37S_R51H_D77G_L84F_A106V_D108N_H123Y_D147Y_E155V_I156F),

### (R51L_L84F_A106V_D108N_H123Y_D147Y_E155V_I156F_K157N),

### (D24G_Q71R_L84F_H96L_A106V_D108N_H123Y_D147Y_E155V_I156F_K160E),

### (H36L_G67V_L84F_A106V_D108N_H123Y_S146T_D147Y_E155V_I156F),

### (Q71L_L84F_A106V_D108N_H123Y_L137M_A143E_D147Y_E155V_I156F),

### (E25G_L84F_A106V_D108N_H123Y_D147Y_E155V_I156F_Q159L),

### (L84F_A91T_F1041_A106V_D108N_H123Y_D147Y_E155V_I156F),

### (N72D_L84F_A106V_D108N_H123Y_G125A_D147Y_E155V_I156F),

### (P48S_L84F_S97C_A106V_D108N_H123Y_D147Y_E155V_I156F),

### (W23G_L84F_A106V_D108N_H123Y_D147Y_E155V_I156F),

### (D24G_P48L_Q71R_L84F_A106V_D108N_H123Y_D147Y_E155V_I156F_Q159L),

### (L84F_A106V_D108N_H123Y_A142N_D147Y_E155V_I156F),

### (H36L_R51L_L84F_A106V_D108N_H123Y_A142N_S146C_D147Y_E155V_I156F_K157N),

### (N37S_L84F_A106V_D108N_H123Y_A142N_D147Y_E155V_I156F_K161T),

### (L84F_A106V_D108N_D147Y_E155V_I156F),

### (R51L_L84F_A106V_D108N_H123Y_S146C_D147Y_E155V_I156F_K157N_K161T),

### (L84F_A106V_D108N_H123Y_S146C_D147Y_E155V_I156F_K161T),

### (L84F_A106V_D108N_H123Y_S146C_D147Y_E155V_I156F_K157N_K160E_K161T),

### (L84F_A106V_D108N_H123Y_S146C_D147Y_E155V_I156F_K157N_K160E),

### (R74Q_L84F_A106V_D108N_H123Y_D147Y_E155V_I156F),

### (R74A_L84F_A106V_D108N_H123Y_D147Y_E155V_I156F),

### (L84F_A106V_D108N_H123Y_D147Y_E155V_I156F),

### (R74Q_L84F_A106V_D108N_H123Y_D147Y_E155V_I156F),

### (L84F_R98Q_A106V_D108N_H123Y_D147Y_E155V_I156F),

### (L84F_A106V_D108N_H123Y_R129Q_D147Y_E155V_I156F),

### (P48S_L84F_A106V_D108N_H123Y_A142N_D147Y_E155V_I156F),

### (P48S_A142N),

### (P48T_I49V_L84F_A106V_D108N_H123Y_A142N_D147Y_E155V_I156F_L157N),

### (P48T_I49V_A142N),

### (H36L_P48S_R51L_L84F_A106V_D108N_H123Y_S146C_D147Y_E155V_I156F_K157N),

### (H36L_P48S_R51L_L84F_A106V_D108N_H123Y_S146C_A142N_D147Y_E155V_I156F

### (H36L_P48T_I49V_R51L_L84F_A106V_D108N_H123Y_S146C_D147Y_E155V_I156F_K157N),

### (H36L_P48T_I49V_R51L_L84F_A106V_D108N_H123Y_A142N_S146C_D147Y_E155V_I156F_K157N),

### (H36L_P48A_R51L_L84F_A106V_D108N_H123Y_S146C_D147Y_E155V_I156F_K157N),

### (H36L_P48A_R51L_L84F_A106V_D108N_H123Y_A142N_S146C_D147Y_E155V_I156F_K157N),

### (H36L_P48A_R51L_L84F_A106V_D108N_H123Y_S146C_A142N_D147Y_E155V_I156F_K157N),

### (W23L_H36L_P48A_R51L_L84F_A106V_D108N_H123Y_S146C_D147Y_E155V_I156F_K157N),

### (W23R_H36L_P48A_R51L_L84F_A106V_D108N_H123Y_S146C_D147Y_E155V_I156F_K157N),

### (W23L_H36L_P48A_R51L_L84F_A106V_D108N_H123Y_S146R_D147Y_E155V_I156F_K161T),

### (H36L_P48A_R51L_L84F_A106V_D108N_H123Y_S146C_D147Y_R152H_E155V_I156F_K157N),

### (H36L_P48A_R51L_L84F_A106V_D108N_H123Y_S146C_D147Y_R152P_E155V_I156F_K157N),

### (W23L_H36L_P48A_R51L_L84F_A106V_D108N_H123Y_S146C_D147Y_R152P_E155V_I156F_K157N),

### (W23L_H36L_P48A_R51L_L84F_A106V_D108N_H123Y_A142A_S146C_D147Y_E155V_I156F_K157N),

### (W23L_H36L_P48A_R51L_L84F_A106V_D108N_H123Y_A142A_S146C_D147Y_R152P_E155V_I156F_K157N),

### (W23L_H36L_P48A_R51L_L84F_A106V_D108N_H123Y_S146R_D147Y_E155V_I156F_K161T),

### (W23R_H36L_P48A_R51L_L84F_A106V_D108N_H123Y_S146C_D147Y_R152P_E155V_I156F_K157N),

### (H36L_P48A_R51L_L84F_A106V_D108N_H123Y_A142N_S146C_D147Y_R152P_E155V_I156F_K157N).

[0379] In some embodiments, the TadA deaminase is TadA variant. In some embodiments, the TadA variant is TadA*7.10. In particular embodiments, the fusion proteins comprise a single TadA*7.10 domain (e.g., provided as a monomer). In other embodiments, the fusion protein comprises TadA*7.10 and TadA(wt), which are capable of forming heterodimers. In one embodiment, a fusion protein of the invention comprises a wild-type TadA linked to TadA*7.10, which is linked to Cas9 nickase.

[0380] In some embodiments, TadA*7.10 comprises at least one alteration. In some embodiments, the adenosine deaminase comprises an alteration in the following sequence:

TadA*7.10
(SEQ ID NO: 8)
MSEVEFSHEYWMRHALTLAKRARDEREVPVGAVLVLNNRVIGEGWNRA
IGLHDPTAHAEIMALRQGGLVMQNYRLIDATLYVTFEPCVMCAGAMIH
SRIGRVVFGVRNAKTGAAGSLMDVLHYPGMNHRVEITEGILADECAAL
LCYFFRMPRQVFNAQKKAQSSTD

[0381] In some embodiments, TadA*7.10 comprises an alteration at amino acid 82 and/or 166. In particular embodiments, TadA*7.10 comprises one or more of the following alterations: Y147T, Y147R, Q154S, Y123H, V82S, T166R, and/or Q154R. In other embodiments, a variant of TadA*7.10 comprises a combination of alterations selected from the group of: Y147T+Q154R; Y147T+Q154S; Y147R+Q154S; V82S+Q154S; V82S+Y147R; V82S+Q154R; V82S+Y123H; I76Y+V82S; V82S+Y123H+Y147T; V82S+Y123H+Y147R; V82S+Y123H+Q154R; Y147R+Q154R+Y123H; Y147R+Q154R+I76Y; Y147R+Q154R+T166R; Y123H+Y147R+Q154R+I76Y; V82S+Y123H+Y147R+Q154R; and I76Y+V82S+Y123H+Y147R+Q154R.

[0382] In some embodiments, an adenosine deaminase variant (e.g., TadA*8) comprises a deletion. In some embodiments, an adenosine deaminase variant comprises a deletion of the C terminus. In particular embodiments, an adenosine deaminase variant comprises a deletion of the C terminus beginning at residue 149, 150, 151, 152, 153, 154, 155, 156, and 157, relative to TadA*7.10, the TadA reference sequence, or a corresponding mutation in another TadA.

[0383] In other embodiments, an adenosine deaminase variant (e.g., TadA*8) is a monomer comprising one or more of the following alterations: Y147T, Y147R, Q154S, Y123H, V82S, T166R, and/or Q154R, relative to TadA*7.10, the TadA reference sequence, or a corresponding mutation in another TadA. In other embodiments, the adenosine deaminase variant (TadA*8) is a monomer comprising a combination of alterations selected from the group of: Y147T+Q154R; Y147T+Q154S; Y147R+Q154S; V82S+Q154S; V82S+Y147R; V82S+Q154R; V82S+Y123H; I76Y+V82S; V82S+Y123H+Y147T; V82S+Y123H+Y147R; V82S+Y123H+Q154R; Y147R+Q154R+Y123H; Y147R+Q154R+I76Y; Y147R+Q154R+T166R; Y123H+Y147R+Q154R+I76Y; V82S+Y123H+Y147R+Q154R; and I76Y+V82S+Y123H+Y147R+Q154R, relative to TadA*7.10, the TadA reference sequence, or a corresponding mutation in another TadA.

[0384] In other embodiments, the adenosine deaminase variant is a homodimer comprising two adenosine deaminase domains (e.g., TadA*8) each having one or more of the following alterations Y147T, Y147R, Q154S, Y123H, V82S, T166R, and/or Q154R, relative to TadA*7.10, the TadA reference sequence, or a corresponding mutation in another TadA. In other embodiments, the adenosine deaminase variant is a homodimer comprising two adenosine deaminase domains (e.g., TadA*8) each having a combination of alterations selected from the group of: Y147T+Q154R; Y147T+Q154S; Y147R+Q154S; V82S+Q154S; V82S+Y147R; V82S+Q154R; V82S+Y123H; I76Y+V82S; V82S+Y123H+Y147T; V82S+Y123H+Y147R; V82S+Y123H+Q154R; Y147R+Q154R+Y123H; Y147R+Q154R+I76Y; Y147R+Q154R+T166R; Y123H+Y147R+Q154R+I76Y; V82S+Y123H+Y147R+Q154R; and I76Y+V82S+Y123H+Y147R+Q154R, relative to TadA*7.10, the TadA reference sequence, or a corresponding mutation in another TadA.

[0385] In other embodiments, the adenosine deaminase variant is a heterodimer of a wild-type adenosine deaminase domain and an adenosine deaminase variant domain (e.g., TadA*8) comprising one or more of the following alterations Y147T, Y147R, Q154S, Y123H, V82S, T166R, and/or Q154R, relative to TadA*7.10, the TadA reference sequence, or a corresponding mutation in another TadA. In other embodiments, the adenosine deaminase variant is a heterodimer of a wild-type adenosine deaminase domain and an adenosine deaminase variant domain (e.g., TadA*8) comprising a combination of alterations selected from the group of: Y147T+Q154R; Y147T+Q154S; Y147R+Q154S; V82S+Q154S; V82S+Y147R; V82S+Q154R; V82S+Y123H; I76Y+V82S; V82S+Y123H+Y147T; V82S+Y123H+Y147R; V82S+Y123H+Q154R; Y147R+Q154R+Y123H; Y147R+Q154R+I76Y; Y147R+Q154R+T166R; Y123H+Y147R+Q154R+I76Y; V82S+Y123H+Y147R+Q154R; and I76Y+V82S+Y123H+Y147R+Q154R, relative to TadA*7.10, the TadA reference sequence, or a corresponding mutation in another TadA.

[0386] In other embodiments, the adenosine deaminase variant is a heterodimer of a TadA*7.10 domain and an adenosine deaminase variant domain (e.g., TadA*8) comprising one or more of the following alterations Y147T, Y147R, Q154S, Y123H, V82S, T166R, and/or Q154R, relative to TadA*7.10, the TadA reference sequence, or a corresponding mutation in another TadA. In other embodiments, the adenosine deaminase variant is a heterodimer of a TadA*7.10 domain and an adenosine deaminase variant domain (e.g., TadA*8) comprising a combination of alterations selected from the group of: Y147T+Q154R; Y147T+Q154S; Y147R+Q154S; V82S+Q154S; V82S+Y147R; V82S+Q154R; V82S+Y123H; I76Y+V82S; V82S+Y123H+Y147T; V82S+Y123H+Y147R; V82S+Y123H+Q154R; Y147R+Q154R+Y123H; Y147R+Q154R+I76Y; Y147R+Q154R+T166R; Y123H+Y147R+Q154R+I76Y; V82S+Y123H+Y147R+Q154R; and I76Y+V82S+Y123H+Y147R+Q154R, relative to TadA*7.10, the TadA reference sequence, or a corresponding mutation in another TadA.

[0387] In particular embodiments, an adenosine deaminase heterodimer comprises a TadA*8 domain and an adenosine deaminase domain selected from Staphylococcus aureus (S. aureus) TadA, Bacillus subtilis (B. subtilis) TadA, Salmonella typhimurium (S. typhimurium) TadA, Shewanella putrefaciens (S. putrefaciens) TadA, Haemophilus influenzae F3031 (H. influenzae) TadA, Caulobacter crescentus (C. crescentus) TadA, Geobacter sulfurreducens (G. sulfurreducens) TadA, or TadA*7.10.

[0388] In some embodiments, an adenosine deaminase is a TadA*8. In one embodiment, an adenosine deaminase is a TadA*8 that comprises or consists essentially of the following sequence or a fragment thereof having adenosine deaminase activity:

(SEQ ID NO: 12)
MSEVEFSHEYWMRHALTLAKRARDEREVPVGAVLVLNNRVIGEGWNRAI
GLHDPTAHAEIMALRQGGLVMQNYRLIDATLYVTFEPCVMCAGAMIHSR
IGRWFGVRNAKTGAAGSLMDVLHYPGMNHRVEITEGILADECAALLCTF
FRMPRQVFNAQKKAQSSTD

[0389] In some embodiments, the TadA*8 is truncated. In some embodiments, the truncated TadA*8 is missing 1, 2, 3, 4, 5, 6, 7, 8, 9, 10, 11, 12, 13, 14, 15, 6, 17, 18, 19, or 20 N-terminal amino acid residues relative to the full length TadA*8. In some embodiments, the truncated TadA*8 is missing 1, 2, 3, 4, 5, 6, 7, 8, 9, 10, 11, 12, 13, 14, 15, 6, 17, 18, 19, or 20 C-terminal amino acid residues relative to the full length TadA*8. In some embodiments the adenosine deaminase variant is a full-length TadA*8.

[0390] In some embodiments the TadA*8 is TadA*8.1, TadA*8.2, TadA*8.3, TadA*8.4, TadA*8.5, TadA*8.6, TadA*8.7, TadA*8.8, TadA*8.9, TadA*8.10, TadA*8.11, TadA*8.12, TadA*8.13, TadA*8.14, TadA*8.15, TadA*8.16, TadA*8.17, TadA*8.18, TadA*8.19, TadA*8.20, TadA*8.21, TadA*8.22, TadA*8.23, or TadA*8.24.

[0391] In other embodiments, a base editor of the disclosure comprising an adenosine deaminase variant (e.g., TadA*8) monomer comprising one or more of the following alterations: R26C, V88A, A109S, T111R, D119N, H122N, Y147D, F149Y, T1661 and/or D167N, relative to TadA*7.10, the TadA reference sequence, or a corresponding mutation in another TadA. In other embodiments, the adenosine deaminase variant (TadA*8) monomer comprises a combination of alterations selected from the group of: R26C+A109S+T111R+D119N+H122N+Y147D+F149Y+T166I+D167N; V88A+A109S+T111R+D119N+H122N+F149Y+T166I+D167N; R26C+A109S+T111R+D119N+H122N+F149Y+T166I+D167N; V88A+T111R+D119N+F149Y; and A109S+T111R+D119N+H122N+Y147D+F149Y+T166I+D167N, relative to TadA*7.10, the TadA reference sequence, or a corresponding mutation in another TadA.

[0392] In other embodiments, a base editor comprises a heterodimer of a wild-type adenosine deaminase domain and an adenosine deaminase variant domain (e.g., TadA*8) comprising one or more of the following alterations R26C, V88A, A109S, T111R, D119N, H122N, Y147D, F149Y, T1661 and/or D167N, relative to TadA*7.10, the TadA reference sequence, or a corresponding mutation in another TadA. In other embodiments, the base editor comprises a heterodimer of a wild-type adenosine deaminase domain and an adenosine deaminase variant domain (e.g., TadA*8) comprising a combination of alterations selected from the group of: R26C+A109S+T111R+D119N+H122N+Y147D+F149Y+T166I+D167N; V88A+A109S+T111R+D119N+H122N+F149Y+T166I+D167N; R26C+A109S+T111R+D119N+H122N+F149Y+T166I+D167N; V88A+T111R+D119N+F149Y; and A109S+T111R+D119N+H122N+Y147D+F149Y+T166I+D167N, relative to TadA*7.10, the TadA reference sequence, or a corresponding mutation in another TadA.

[0393] In other embodiments, a base editor comprises a heterodimer of a TadA*7.10 domain and an adenosine deaminase variant domain (e.g., TadA*8) comprising one or more of the following alterations R26C, V88A, A109S, T111R, D119N, H122N, Y147D, F149Y, T1661 and/or D167N, relative to TadA*7.10, the TadA reference sequence, or a corresponding mutation in another TadA. In other embodiments, the base editor comprises a heterodimer of a TadA*7.10 domain and an adenosine deaminase variant domain (e.g., TadA*8) comprising a combination of alterations selected from the group of: R26C+A109S+T111R+D119N+H122N+Y147D+F149Y+T166I+D167N; V88A+A109S+T111R+D119N+H122N+F149Y+T166I+D167N; R26C+A109S+T111R+D119N+H122N+F149Y+T166I+D167N; V88A+T111R+D119N+F149Y; and A109S+T111R+D119N+H122N+Y147D+F149Y+T166I+D167N, relative to TadA*7.10, the TadA reference sequence, or a corresponding mutation in another TadA.

[0394] In some embodiments, the TadA*8 is a variant as shown in Table 5. Table 5 shows certain amino acid position numbers in the TadA amino acid sequence and the amino acids present in those positions in the TadA-7.10 adenosine deaminase. Table 5 also shows amino acid changes in TadA variants relative to TadA-7.10 following phage-assisted non-continuous evolution (PANCE) and phage-assisted continuous evolution (PACE), as described in M. Richter et al., 2020, Nature Biotechnology, doi.org/10.1038/s41587-020-0453-z, the entire contents of which are incorporated by reference herein. In some embodiments, the TadA*8 is TadA*8a, TadA*8b, TadA*8c, TadA*8d, or TadA*8e. In some embodiments, the TadA*8 is TadA*8e.

TABLE 5
Select TadA*8 Variants

| | | TadA amino acid number | | | | | | | | | |
|---|---|---|---|---|---|---|---|---|---|---|---|
| | TadA | 26 | 88 | 109 | 111 | 119 | 122 | 147 | 149 | 166 | 167 |
| | TadA-7.10 | R | V | A | T | D | H | Y | F | T | D |
| PANCE 1 | | | | | R | | | | | | |

| PANCE 2 | | | | S/T | R | | | | |
|---|---|---|---|---|---|---|---|---|---|
| PACE | TadA-8a | C | S | R | N | N | D | I | N |

| | | | | | | | | | | |
|---|---|---|---|---|---|---|---|---|---|---|
| TadA-8b | | A | S | R | N | N | | Y | I | N |
| TadA-8c | C | | S | R | N | N | | Y | I | N |
| TadA-8d | | A | | R | N | | | Y | | |
| TadA-8e | | | S | R | N | N | D | Y | I | N |

[0395] In one embodiment, a fusion protein of the invention comprises a wild-type TadA is linked to an adenosine deaminase variant described herein (e.g., TadA*8), which is linked to Cas9 nickase. In particular embodiments, the fusion proteins comprise a single TadA*8 domain (e.g., provided as a monomer). In other embodiments, the fusion protein comprises TadA*8 and TadA(wt), which are capable of forming heterodimers.

[0396] In some embodiments, the adenosine deaminase comprises an amino acid sequence that is at least 60%, at least 65%, at least 70%, at least 75%, at least 80%, at least 85%, at least 90%, at least 95%, at least 96%, at least 97%, at least 98%, at least 99%, or at least 99.5% identical to any one of the amino acid sequences set forth in any of the adenosine deaminases provided herein. It should be appreciated that adenosine deaminases provided herein may include one or more mutations (e.g., any of the mutations provided herein). The disclosure provides any deaminase domains with a certain percent identity plus any of the mutations or combinations thereof described herein. In some embodiments, the adenosine deaminase comprises an amino acid sequence that has 1, 2, 3, 4, 5, 6, 7, 8, 9, 10, 11, 12, 13, 14, 15, 16, 17, 18, 19, 20, 21, 22, 21, 24, 25, 26, 27, 28, 29, 30, 31, 32, 33, 34, 35, 36, 37, 38, 39, 40, 41, 42, 43, 44, 45, 46, 47, 48, 49, 50, or more mutations compared to a reference sequence, or any of the adenosine deaminases provided herein. In some embodiments, the adenosine deaminase comprises an amino acid sequence that has at least 5, at least 10, at least 15, at least 20, at least 25, at least 30, at least 35, at least 40, at least 45, at least 50, at least 60, at least 70, at least 80, at least 90, at least 100, at least 110, at least 120, at least 130, at least 140, at least 150, at least 160, or at least 170 identical contiguous amino acid residues as compared to any one of the amino acid sequences known in the art or described herein.

[0397] In particular embodiments, a TadA*8 comprises one or more mutations at any of the following positions shown in bold. In other embodiments, a TadA*8 comprises one or more mutations at any of the positions shown with underlining:

(SEQ ID NO: 8)
MSEVEFSHEY WMRHALTLAK RARDEREVPV GAVLVLNNRV IGEGWNRAIG ⁵⁰LHDPTAHAEI
MALRQGGLVM QNYRLIDATL YVTFEPCVMC AGAMIHSRIG ¹⁰⁰ RWFGVRNAK
TGAAGSLMDV LHYPGMNHRV EITEGILADE CAALLCYFFR ¹⁵⁰ MPRQVFNAQK KAQSSTD

[0398] For example, the TadA*8 comprises alterations at amino acid position 82 and/or 166 (e.g., V82S, T166R) alone or in combination with any one or more of the following Y147T, Y147R, Q154S, Y123H, and/or Q154R, relative to TadA*7.10, the TadA reference sequence, or a corresponding mutation in another TadA. In particular embodiments, a combination of alterations is selected from the group of: Y147T+Q154R; Y147T+Q154S; Y147R+Q154S; V82S+Q154S; V82S+Y147R; V82S+Q154R; V82S+Y123H; I76Y+V82S; V82S+Y123H+Y147T; V82S+Y123H+Y147R; V82S+Y123H+Q154R; Y147R+Q154R+Y123H; Y147R+Q154R+I76Y; Y147R+Q154R+T166R; Y123H+Y147R+Q154R+I76Y; V82S+Y123H+Y147R+Q154R; and I76Y+V82S+Y123H+Y147R+Q154R, relative to TadA*7.10, the TadA reference sequence, or a corresponding mutation in another TadA.

[0399] In some embodiments, the TadA*8 is truncated. In some embodiments, the truncated TadA*8 is missing 1, 2, 3, 4, 5, 6, 7, 8, 9, 10, 11, 12, 13, 14, 15, 6, 17, 18, 19, or 20 N-terminal amino acid residues relative to the full length TadA*8. In some embodiments, the truncated TadA*8 is missing 1, 2, 3, 4, 5, 6, 7, 8, 9, 10, 11, 12, 13, 14, 15, 6, 17, 18, 19, or 20 C-terminal amino acid residues relative to the full length TadA*8. In some embodiments the adenosine deaminase variant is a full-length TadA*8.

[0400] In one embodiment, a fusion protein of the invention comprises a wild-type TadA is linked to an adenosine deaminase variant described herein (e.g., TadA*8), which is linked to Cas9 nickase. In particular embodiments, the fusion proteins comprise a single TadA*8 domain (e.g., provided as a monomer). In other embodiments, the base editor comprises TadA*8 and TadA(wt), which are capable of forming heterodimers.

[0401] In particular embodiments, the fusion proteins comprise a single (e.g., provided as a monomer) TadA*8. In some embodiments, the TadA*8 is linked to a Cas9 nickase. In some embodiments, the fusion proteins of the invention comprise as a heterodimer of a wild-type TadA (TadA(wt)) linked to a TadA*8. In other embodiments, the fusion proteins of the invention comprise as a heterodimer of a TadA*7.10 linked to a TadA*8. In some embodiments, the base editor is ABE8 comprising a TadA*8 variant monomer. In some embodiments, the base editor is ABE8 comprising a heterodimer of a TadA*8 and a TadA(wt). In some embodiments, the base editor is ABE8 comprising a heterodimer of a TadA*8 and TadA*7.10. In some embodiments, the base editor is ABE8 comprising a heterodimer of a TadA*8. In some embodiments, the TadA*8 is selected from Table 11, 13 or 14. In some embodiments, the ABE8 is selected from Table 13, 14 or 16.

[0402] In some embodiments, the adenosine deaminase is a TadA*9 variant. In some embodiments, the adenosine deaminase is a TadA*9 variant selected from the variants described below and with reference to the following sequence (termed TadA*7.10):

(SEQ ID NO: 8)
MSEVEFSHEY WMRHALTLAK RARDEREVPV GAVLVLNNRV
IGEGWNRAIG LHDPTAHAEI MALRQGGLVM QNYRLIDATL
YVTFEPCVMC AGAMIHSRIG RVVFGVRNAK TGAAGSLMDV
LHYPGMNHRV EITEGILADE CAALLCYFFR MPRQVFNAQK
KAQSSTD.

[0403] In some embodiments, an adenosine deaminase comprises one or more of the following alterations: R21N, R23H, E25F, N38G, L51W, P54C, M70V, Q71M, N72K, Y73S, V82T, M94V, P124W, T133K, D139L, D139M, C146R, and A158K. The one or more alternations are shown in the sequence above in underlining and bold font.

[0404] In some embodiments, an adenosine deaminase comprises one or more of the following combinations of alterations: V82S+Q154R+Y147R; V82S+Q154R+Y123H; V82S+Q154R+Y147R+Y123H; Q154R+Y147R+Y123H+I76Y+V82S; V82S+I76Y; V82S+Y147R; V82S+Y147R+Y123H; V82S+Q154R+Y123H; Q154R+Y147R+Y123H+I76Y; V82S+Y147R; V82S+Y147R+Y123H; V82S+Q154R+Y123H; V82S+Q154R+Y147R; V82S+Q154R+Y147R; Q154R+Y147R+Y123H+I76Y; Q154R+Y147R+Y123H+I76Y+V82S; I76Y_V82S_Y123H_Y147R_Q154R; Y147R+Q154R+H123H; and V82S+Q154R.

[0405] In some embodiments, an adenosine deaminase comprises one or more of the following combinations of alterations: E25F+V82S+Y123H, T133K+Y147R+Q154R; E25F+V82S+Y123H+Y147R+Q154R; L51W+V82S+Y123H+C146R+Y147R+Q154R; Y73S+V82S+Y123H+Y147R+Q154R; P54C+V82S+Y123H+Y147R+Q154R; N38G+V82T+Y123H+Y147R+Q154R; N72K+V82S+Y123H+D139L+Y147R+Q154R; E25F+V82S+Y123H+D139M+Y147R+Q154R; Q71M+V82S+Y123H+Y147R+Q154R; E25F+V82S+Y123H+T133K+Y147R+Q154R; E25F+V82S+Y123H+Y147R+Q154R; V82S+Y123H+P124W+Y147R+Q154R; L51W+V82S+Y123H+C146R+Y147R+Q154R; P54C+V82S+Y123H+Y147R+Q154R; Y73S+V82S+Y123H+Y147R+Q154R; N38G+V82T+Y123H+Y147R+Q154R; R23H+V82S+Y123H+Y147R+Q154R; R21N+V82S+Y123H+Y147R+Q154R; V82S+Y123H+Y147R+Q154R+A158K; N72K+V82S+Y123H+D139L+Y147R+Q154R; E25F+V82S+Y123H+D139M+Y147R+Q154R; and M70V+V82S+M94V+Y123H+Y147R+Q154R

[0406] In some embodiments, an adenosine deaminase comprises one or more of the following combinations of alterations: Q71M+V82S+Y123H+Y147R+Q154R; E25F+I76Y+V82S+Y123H+Y147R+Q154R; I76Y+V82T+Y123H+Y147R+Q154R; N38G+I76Y+V82S+Y123H+Y147R+Q154R; R23H+I76Y+V82S+Y123H+Y147R+Q154R; P54C+I76Y+V82S+Y123H+Y147R+Q154R; R21N+I76Y+V82S+Y123H+Y147R+Q154R; I76Y+V82S+Y123H+D139M+Y147R+Q154R; Y73S+I76Y+V82S+Y123H+Y147R+Q154R; E25F+I76Y+V82S+Y123H+Y147R+Q154R; I76Y+V82T+Y123H+Y147R+Q154R; N38G+I76Y+V82S+Y123H+Y147R+Q154R; R23H+I76Y+V82S+Y123H+Y147R+Q154R; P54C+I76Y+V82S+Y123H+Y147R+Q154R; R21N+I76Y+V82S+Y123H+Y147R+Q154R; I76Y+V82S+Y123H+D139M+Y147R+Q154R; Y73S+I76Y+V82S+Y123H+Y147R+Q154R; and V82S+Q154R; N72K_V82S+Y123H+Y147R+Q154R; Q71M_V82S+Y123H+Y147R+Q154R; V82S+Y123H+T133K+Y147R+Q154R; V82S+Y123H+T133K+Y147R+Q154R+A158K; M70V+Q71M+N72K+V82S+Y123H+Y147R+Q154R; N72K_V82S+Y123H+Y147R+Q154R; Q71M_V82S+Y123H+Y147R+Q154R; M70V+V82S+M94V+Y123H+Y147R+Q154R; V82S+Y123H+T133K+Y147R+Q154R; V82S+Y123H+T133K+Y147R+Q154R+A158K; and M70V+Q71M+N72K+V82S+Y123H+Y147R+Q154R. In some embodiments, the adenosine deaminase is expressed as a monomer. In other embodiments, the adenosine deaminase is expressed as a heterodimer. In some embodiments, the deaminase or other polypeptide sequence lacks a methionine, for example when included as a component of a fusion protein. This can alter the numbering of positions. However, the skilled person will understand that such corresponding mutations refer to the same mutation, e.g., Y73S and Y72S and D139M and D138M.

[0407] In some embodiments, the TadA*9 variant comprises the alterations described in Table 17 as described herein. In some embodiments, the TadA*9 variant is a monomer. In some embodiments, the TadA*9 variant is a heterodimer with a wild-type TadA adenosine deaminase. In some embodiments, the TadA*9 variant is a heterodimer with another TadA variant (e.g., TadA*8, TadA*9). Additional details of TadA*9 adenosine deaminases are described in International PCT Application No. PCT/2020/049975, which is incorporated herein by reference for its entirety.

[0408] Any of the mutations provided herein and any additional mutations (e.g., based on the ecTadA amino acid sequence) can be introduced into any other adenosine deaminases. Any of the mutations provided herein can be made individually or in any combination in TadA reference sequence or another adenosine deaminase (e.g., ecTadA).

[0409] Details of A to G nucleobase editing proteins are described in International PCT Application No. PCT/2017/045381 (WO2018/027078) and Gaudelli, N. M., et al., “Programmable base editing of A•T to G•C in genomic DNA without DNA cleavage” Nature, 551, 464-471 (2017), the entire contents of which are hereby incorporated by reference.

### C to T Editing

[0410] In some embodiments, a base editor disclosed herein comprises a fusion protein comprising cytidine deaminase capable of deaminating a target cytidine (C) base of a polynucleotide to produce uridine (U), which has the base pairing properties of thymine. In some embodiments, for example where the polynucleotide is double-stranded (e.g., DNA), the uridine base can then be substituted with a thymidine base (e.g., by cellular repair machinery) to give rise to a C:G to a T:A transition. In other embodiments, deamination of a C to U in a nucleic acid by a base editor cannot be accompanied by substitution of the U to a T.

[0411] The deamination of a target C in a polynucleotide to give rise to a U is a non-limiting example of a type of base editing that can be executed by a base editor described herein. In another example, a base editor comprising a cytidine deaminase domain can mediate conversion of a cytosine (C) base to a guanine (G) base. For example, a U of a polynucleotide produced by deamination of a cytidine by a cytidine deaminase domain of a base editor can be excised from the polynucleotide by a base excision repair mechanism (e.g., by an uracil DNA glycosylase (UDG) domain), producing an abasic site. The nucleobase opposite the abasic site can then be substituted (e.g., by base repair machinery) with another base, such as a C, by for example a translesion polymerase. Although it is typical for a nucleobase opposite an abasic site to be replaced with a C, other substitutions (e.g., A, G or T) can also occur.

[0412] Accordingly, in some embodiments a base editor described herein comprises a deamination domain (e.g., cytidine deaminase domain) capable of deaminating a target C to a U in a polynucleotide. Further, as described below, the base editor can comprise additional domains which facilitate conversion of the U resulting from deamination to, in some embodiments, a T or a G. For example, a base editor comprising a cytidine deaminase domain can further comprise an uracil glycosylase inhibitor (UGI) domain to mediate substitution of a U by a T, completing a C-to-T base editing event. In another example, a base editor can incorporate a translesion polymerase to improve the efficiency of C-to-G base editing, since a translesion polymerase can facilitate incorporation of a C opposite an abasic site (i.e., resulting in incorporation of a G at the abasic site, completing the C-to-G base editing event).

[0413] A base editor comprising a cytidine deaminase as a domain can deaminate a target C in any polynucleotide, including DNA, RNA and DNA-RNA hybrids. Typically, a cytidine deaminase catalyzes a C nucleobase that is positioned in the context of a single-stranded portion of a polynucleotide. In some embodiments, the entire polynucleotide comprising a target C can be single-stranded. For example, a cytidine deaminase incorporated into the base editor can deaminate a target C in a single-stranded RNA polynucleotide. In other embodiments, a base editor comprising a cytidine deaminase domain can act on a double-stranded polynucleotide, but the target C can be positioned in a portion of the polynucleotide which at the time of the deamination reaction is in a single-stranded state. For example, in embodiments where the NAGPB domain comprises a Cas9 domain, several nucleotides can be left unpaired during formation of the Cas9-gRNA-target DNA complex, resulting in formation of a Cas9 “R-loop complex”. These unpaired nucleotides can form a bubble of single-stranded DNA that can serve as a substrate for a single-strand specific nucleotide deaminase enzyme (e.g., cytidine deaminase).

[0414] In some embodiments, a cytidine deaminase of a base editor can comprise all or a portion of an apolipoprotein B mRNA editing complex (APOBEC) family deaminase. APOBEC is a family of evolutionarily conserved cytidine deaminases. Members of this family are C-to-U editing enzymes. The N-terminal domain of APOBEC like proteins is the catalytic domain, while the C-terminal domain is a pseudocatalytic domain. More specifically, the catalytic domain is a zinc dependent cytidine deaminase domain and is important for cytidine deamination. APOBEC family members include APOBEC1, APOBEC2, APOBEC3A, APOBEC3B, APOBEC3C, APOBEC3D (“APOBEC3E” now refers to this), APOBEC3F, APOBEC3G, APOBEC3H, APOBEC4, and Activation-induced (cytidine) deaminase. In some embodiments, a deaminase incorporated into a base editor comprises all or a portion of an APOBEC1 deaminase. In some embodiments, a deaminase incorporated into a base editor comprises all or a portion of APOBEC2 deaminase. In some embodiments, a deaminase incorporated into a base editor comprises all or a portion of is an APOBEC3 deaminase. In some embodiments, a deaminase incorporated into a base editor comprises all or a portion of an APOBEC3A deaminase. In some embodiments, a deaminase incorporated into a base editor comprises all or a portion of APOBEC3B deaminase. In some embodiments, a deaminase incorporated into a base editor comprises all or a portion of APOBEC3C deaminase. In some embodiments, a deaminase incorporated into a base editor comprises all or a portion of APOBEC3D deaminase. In some embodiments, a deaminase incorporated into a base editor comprises all or a portion of APOBEC3E deaminase. In some embodiments, a deaminase incorporated into a base editor comprises all or a portion of APOBEC3F deaminase. In some embodiments, a deaminase incorporated into a base editor comprises all or a portion of APOBEC3G deaminase. In some embodiments, a deaminase incorporated into a base editor comprises all or a portion of APOBEC3H deaminase. In some embodiments, a deaminase incorporated into a base editor comprises all or a portion of APOBEC4 deaminase. In some embodiments, a deaminase incorporated into a base editor comprises all or a portion of activation-induced deaminase (AID). In some embodiments a deaminase incorporated into a base editor comprises all or a portion of cytidine deaminase 1 (CDA1). It should be appreciated that a base editor can comprise a deaminase from any suitable organism (e.g., a human or a rat). In some embodiments, a deaminase domain of a base editor is from a human, chimpanzee, gorilla, monkey, cow, dog, rat, or mouse. In some embodiments, the deaminase domain of the base editor is derived from rat (e.g., rat APOBEC1). In some embodiments, the deaminase domain of the base editor is human APOBEC1. In some embodiments, the deaminase domain of the base editor is pmCDA1.

[0415] Other exemplary deaminases that can be fused to Cas9 according to aspects of this disclosure are provided below. In embodiments, the deaminases are activation-induced deaminases (AID). It should be understood that, in some embodiments, the active domain of the respective sequence can be used, e.g., the domain without a localizing signal (nuclear localization sequence, without nuclear export signal, cytoplasmic localizing signal).

[0416] Some aspects of the present disclosure are based on the recognition that modulating the deaminase domain catalytic activity of any of the fusion proteins described herein, for example by making point mutations in the deaminase domain, affect the processivity of the fusion proteins (e.g., base editors). For example, mutations that reduce, but do not eliminate, the catalytic activity of a deaminase domain within a base editing fusion protein can make it less likely that the deaminase domain will catalyze the deamination of a residue adjacent to a target residue, thereby narrowing the deamination window. The ability to narrow the deamination window can prevent unwanted deamination of residues adjacent to specific target residues, which can decrease or prevent off-target effects.

[0417] For example, in some embodiments, an APOBEC deaminase incorporated into a base editor can comprise one or more mutations selected from the group consisting of H121X, H122X, R126X, R126X, R118X, W90X, W90X, and R132X of rAPOBEC1, or one or more corresponding mutations in another APOBEC deaminase, wherein X is any amino acid. In some embodiments, an APOBEC deaminase incorporated into a base editor can comprise one or more mutations selected from the group consisting of H121R, H122R, R126A, R126E, R118A, W90A, W90Y, and R132E of rAPOBEC1, or one or more corresponding mutations in another APOBEC deaminase.

[0418] In some embodiments, an APOBEC deaminase incorporated into a base editor can comprise one or more mutations selected from the group consisting of D316X, D317X, R320X, R320X, R313X, W285X, W285X, R326X of hAPOBEC3G, or one or more corresponding mutations in another APOBEC deaminase, wherein X is any amino acid. In some embodiments, any of the fusion proteins provided herein comprise an APOBEC deaminase comprising one or more mutations selected from the group consisting of D316R, D317R, R320A, R320E, R313A, W285A, W285Y, R326E of hAPOBEC3G, or one or more corresponding mutations in another APOBEC deaminase.

[0419] In some embodiments, an APOBEC deaminase incorporated into a base editor can comprise a H121R and a H122R mutation of rAPOBEC1, or one or more corresponding mutations in another APOBEC deaminase. In some embodiments an APOBEC deaminase incorporated into a base editor can comprise an APOBEC deaminase comprising a R126A mutation of rAPOBEC1, or one or more corresponding mutations in another APOBEC deaminase. In some embodiments, an APOBEC deaminase incorporated into a base editor can comprise an APOBEC deaminase comprising a R126E mutation of rAPOBEC1, or one or more corresponding mutations in another APOBEC deaminase. In some embodiments, an APOBEC deaminase incorporated into a base editor can comprise an APOBEC deaminase comprising a R118A mutation of rAPOBEC1, or one or more corresponding mutations in another APOBEC deaminase. In some embodiments, an APOBEC deaminase incorporated into a base editor can comprise an APOBEC deaminase comprising a W90A mutation of rAPOBEC1, or one or more corresponding mutations in another APOBEC deaminase. In some embodiments, an APOBEC deaminase incorporated into a base editor can comprise an APOBEC deaminase comprising a W90Y mutation of rAPOBEC1, or one or more corresponding mutations in another APOBEC deaminase. In some embodiments, an APOBEC deaminase incorporated into a base editor can comprise an APOBEC deaminase comprising a R132E mutation of rAPOBEC1, or one or more corresponding mutations in another APOBEC deaminase. In some embodiments an APOBEC deaminase incorporated into a base editor can comprise an APOBEC deaminase comprising a W90Y and a R126E mutation of rAPOBEC1, or one or more corresponding mutations in another APOBEC deaminase. In some embodiments, an APOBEC deaminase incorporated into a base editor can comprise an APOBEC deaminase comprising a R126E and a R132E mutation of rAPOBEC1, or one or more corresponding mutations in another APOBEC deaminase. In some embodiments, an APOBEC deaminase incorporated into a base editor can comprise an APOBEC deaminase comprising a W90Y and a R132E mutation of rAPOBEC1, or one or more corresponding mutations in another APOBEC deaminase. In some embodiments, an APOBEC deaminase incorporated into a base editor can comprise an APOBEC deaminase comprising a W90Y, R126E, and R132E mutation of rAPOBEC1, or one or more corresponding mutations in another APOBEC deaminase.

[0420] In some embodiments, an APOBEC deaminase incorporated into a base editor can comprise an APOBEC deaminase comprising a D316R and a D317R mutation of hAPOBEC3G, or one or more corresponding mutations in another APOBEC deaminase. In some embodiments, any of the fusion proteins provided herein comprise an APOBEC deaminase comprising a R320A mutation of hAPOBEC3G, or one or more corresponding mutations in another APOBEC deaminase. In some embodiments, an APOBEC deaminase incorporated into a base editor can comprise an APOBEC deaminase comprising a R320E mutation of hAPOBEC3G, or one or more corresponding mutations in another APOBEC deaminase. In some embodiments, an APOBEC deaminase incorporated into a base editor can comprise an APOBEC deaminase comprising a R313A mutation of hAPOBEC3G, or one or more corresponding mutations in another APOBEC deaminase. In some embodiments, an APOBEC deaminase incorporated into a base editor can comprise an APOBEC deaminase comprising a W285A mutation of hAPOBEC3G, or one or more corresponding mutations in another APOBEC deaminase. In some embodiments, an APOBEC deaminase incorporated into a base editor can comprise an APOBEC deaminase comprising a W285Y mutation of hAPOBEC3G, or one or more corresponding mutations in another APOBEC deaminase. In some embodiments, an APOBEC deaminase incorporated into a base editor can comprise an APOBEC deaminase comprising a R326E mutation of hAPOBEC3G, or one or more corresponding mutations in another APOBEC deaminase. In some embodiments, an APOBEC deaminase incorporated into a base editor can comprise an APOBEC deaminase comprising a W285Y and a R320E mutation of hAPOBEC3G, or one or more corresponding mutations in another APOBEC deaminase. In some embodiments, an APOBEC deaminase incorporated into a base editor can comprise an APOBEC deaminase comprising a R320E and a R326E mutation of hAPOBEC3G, or one or more corresponding mutations in another APOBEC deaminase. In some embodiments, an APOBEC deaminase incorporated into a base editor can comprise an APOBEC deaminase comprising a W285Y and a R326E mutation of hAPOBEC3G, or one or more corresponding mutations in another APOBEC deaminase. In some embodiments, an APOBEC deaminase incorporated into a base editor can comprise an APOBEC deaminase comprising a W285Y, R320E, and R326E mutation of hAPOBEC3G, or one or more corresponding mutations in another APOBEC deaminase.

[0421] A number of modified cytidine deaminases are commercially available, including, but not limited to, SaBE3, SaKKH-BE3, VQR-BE3, EQR-BE3, VRER-BE3, YE1-BE3, EE-BE3, YE2-BE3, and YEE-BE3, which are available from Addgene (plasmids 85169, 85170, 85171, 85172, 85173, 85174, 85175, 85176, 85177). In some embodiments, a deaminase incorporated into a base editor comprises all or a portion of an APOBEC1 deaminase.

[0422] Details of C to T nucleobase editing proteins are described in International PCT Application No. PCT/US2016/058344 (WO2017/070632) and Komor, A. C., et al., “Programmable editing of a target base in genomic DNA without double-stranded DNA cleavage” Nature 533, 420-424 (2016), the entire contents of which are hereby incorporated by reference.

### Cytidine Deaminases

[0423] In some embodiments, the fusion proteins of the invention comprise one or more cytidine deaminase domains. In some embodiments, the cytidine deaminases provided herein are capable of deaminating cytosine or 5-methylcytosine to uracil or thymine. In some embodiments, the cytidine deaminases provided herein are capable of deaminating cytosine in DNA. The cytidine deaminase may be derived from any suitable organism. In some embodiments, the cytidine deaminase is a naturally-occurring cytidine deaminase that includes one or more mutations corresponding to any of the mutations provided herein. One of skill in the art will be able to identify the corresponding residue in any homologous protein, e.g., by sequence alignment and determination of homologous residues. Accordingly, one of skill in the art would be able to generate mutations in any naturally-occurring cytidine deaminase that corresponds to any of the mutations described herein. In some embodiments, the cytidine deaminase is from a prokaryote. In some embodiments, the cytidine deaminase is from a bacterium. In some embodiments, the cytidine deaminase is from a mammal (e.g., human).

[0424] In some embodiments, the cytidine deaminase comprises an amino acid sequence that is at least 60%, at least 65%, at least 70%, at least 75%, at least 80%, at least 85%, at least 90%, at least 95%, at least 96%, at least 97%, at least 98%, at least 99%, or at least 99.5% identical to any one of the cytidine deaminase amino acid sequences set forth herein. It should be appreciated that cytidine deaminases provided herein may include one or more mutations (e.g., any of the mutations provided herein). Some embodiments provide a polynucleotide molecule encoding the cytidine deaminase nucleobase editor polypeptide of any previous aspect or as delineated herein. In some embodiments, the polynucleotide is codon optimized.

[0425] The disclosure provides any deaminase domains with a certain percent identity plus any of the mutations or combinations thereof described herein. In some embodiments, the cytidine deaminase comprises an amino acid sequence that has 1, 2, 3, 4, 5, 6, 7, 8, 9, 10, 11, 12, 13, 14, 15, 16, 17, 18, 19, 20, 21, 22, 21, 24, 25, 26, 27, 28, 29, 30, 31, 32, 33, 34, 35, 36, 37, 38, 39, 40, 41, 42, 43, 44, 45, 46, 47, 48, 49, 50, or more mutations compared to a reference sequence, or any of the cytidine deaminases provided herein. In some embodiments, the cytidine deaminase comprises an amino acid sequence that has at least 5, at least 10, at least 15, at least 20, at least 25, at least 30, at least 35, at least 40, at least 45, at least 50, at least 60, at least 70, at least 80, at least 90, at least 100, at least 110, at least 120, at least 130, at least 140, at least 150, at least 160, or at least 170 identical contiguous amino acid residues as compared to any one of the amino acid sequences known in the art or described herein.

[0426] A fusion protein of the invention second protein comprises two or more nucleic acid editing domains.

### Guide Polynucleotides

[0427] A polynucleotide programmable nucleotide binding domain, when in conjunction with a bound guide polynucleotide (e.g., gRNA), can specifically bind to a target polynucleotide sequence (i.e., via complementary base pairing between bases of the bound guide nucleic acid and bases of the target polynucleotide sequence) and thereby localize the base editor to the target nucleic acid sequence desired to be edited. In some embodiments, the target polynucleotide sequence comprises single-stranded DNA or double-stranded DNA. In some embodiments, the target polynucleotide sequence comprises RNA. In some embodiments, the target polynucleotide sequence comprises a DNA-RNA hybrid.

[0428] CRISPR is an adaptive immune system that provides protection against mobile genetic elements (viruses, transposable elements and conjugative plasmids). CRISPR clusters contain spacers, sequences complementary to antecedent mobile elements, and target invading nucleic acids. CRISPR clusters are transcribed and processed into CRISPR RNA (crRNA). In type II CRISPR systems, correct processing of pre-crRNA requires a trans-encoded small RNA (tracrRNA), endogenous ribonuclease 3 (rnc) and a Cas9 protein. The tracrRNA serves as a guide for ribonuclease 3-aided processing of pre-crRNA. Subsequently, Cas9/crRNA/tracrRNA endonucleolytically cleaves linear or circular dsDNA target complementary to the spacer. The target strand not complementary to crRNA is first cut endonucleolytically, and then trimmed 3′-5′ exonucleolytically. In nature, DNA-binding and cleavage typically requires protein and both RNAs. However, single guide RNAs (“sgRNA”, or simply “gRNA”) can be engineered so as to incorporate aspects of both the crRNA and tracrRNA into a single RNA species. See, e.g., Jinek M., Chylinski K., Fonfara I., Hauer M., Doudna J. A., Charpentier E. Science 337:816-821(2012), the entire contents of which is hereby incorporated by reference. Cas9 recognizes a short motif in the CRISPR repeat sequences (the PAM or protospacer adjacent motif) to help distinguish self versus non-self. See e.g., “Complete genome sequence of an M1 strain of Streptococcus pyogenes.” Ferretti, J. J. et al., Natl. Acad. Sci. U.S.A. 98:4658-4663(2001); “CRISPR RNA maturation by trans-encoded small RNA and host factor RNase Ill.” Deltcheva E. et al., Nature 471:602-607(2011); and “Programmable dual-RNA-guided DNA endonuclease in adaptive bacterial immunity.” Jinek M. et al, Science 337:816-821(2012), the entire contents of each of which are incorporated herein by reference).

[0429] The PAM sequence can be any PAM sequence known in the art. Suitable PAM sequences include, but are not limited to, NGG, NGA, NGC, NGN, NGT, NGCG, NGAG, NGAN, NGNG, NGCN, NGCG, NGTN, NNGRRT, NNNRRT, NNGRR(N), TTTV, TYCV, TYCV, TATV, NNNNGATT, NNAGAAW, or NAAAAC. Y is a pyrimidine; N is any nucleotide base; W is A or T.

[0430] In an embodiment, a guide polynucleotide described herein can be RNA or DNA. In one embodiment, the guide polynucleotide is a gRNA. An RNA/Cas complex can assist in “guiding” a Cas protein to a target DNA. Cas9/crRNA/tracrRNA endonucleolytically cleaves linear or circular dsDNA target complementary to the spacer. The target strand not complementary to crRNA is first cut endonucleolytically, then trimmed 3′-5′ exonucleolytically. In nature, DNA-binding and cleavage typically requires protein and both RNAs. However, single guide RNAs (“sgRNA”, or simply “gRNA”) can be engineered so as to incorporate aspects of both the crRNA and tracrRNA into a single RNA species. See, e.g., Jinek M. et al., Science 337:816-821(2012), the entire contents of which is hereby incorporated by reference.

[0431] In some embodiments, the guide polynucleotide is at least one single guide RNA (“sgRNA” or “gNRA”). In some embodiments, a guide polynucleotide comprises two or more individual polynucleotides, which can interact with one another via for example complementary base pairing (e.g., a dual guide polynucleotide, dual gRNA). For example, a guide polynucleotide can comprise a CRISPR RNA (crRNA) and a trans-activating CRISPR RNA (tracrRNA) or can comprise one or more trans-activating CRISPR RNA (tracrRNA).

[0432] In some embodiments, the guide polynucleotide is at least one tracrRNA. In some embodiments, the guide polynucleotide does not require PAM sequence to guide the polynucleotide-programmable DNA-binding domain (e.g., Cas9 or Cpf1) to the target nucleotide sequence.

[0433] A guide polynucleotide may include natural or non-natural (or unnatural) nucleotides (e.g., peptide nucleic acid or nucleotide analogs). In some cases, the targeting region of a guide nucleic acid sequence can be at least 15, 16, 17, 18, 19, 20, 21, 22, 23, 24, 25, 26, 27, 28, 29, or 30 nucleotides in length. A targeting region of a guide nucleic acid can be between 10-30 nucleotides in length, or between 15-25 nucleotides in length, or between 15-20 nucleotides in length.

[0434] In some embodiments, the base editor provided herein utilizes one or more guide polynucleotide (e.g., multiple gRNA). In some embodiments, a single guide polynucleotide is utilized for different base editors described herein. For example, a single guide polynucleotide can be utilized for a cytidine base editor and an adenosine base editor.

[0435] In some embodiments, the methods described herein can utilize an engineered Cas protein. A guide RNA (gRNA) is a short synthetic RNA composed of a scaffold sequence necessary for Cas-binding and a user-defined ˜20 nucleotide spacer that defines the genomic target to be modified. Exemplary gRNA scaffold sequences are provided in the sequence listing as SEQ ID NOs: 224-230, 223, 3000, and 243-245. Thus, a skilled artisan can change the genomic target of the Cas protein specificity is partially determined by how specific the gRNA targeting sequence is for the genomic target compared to the rest of the genome.

[0436] In other embodiments, a guide polynucleotide can comprise both the polynucleotide targeting portion of the nucleic acid and the scaffold portion of the nucleic acid in a single molecule (i.e., a single-molecule guide nucleic acid). For example, a single-molecule guide polynucleotide can be a single guide RNA (sgRNA or gRNA). Herein the term guide polynucleotide sequence contemplates any single, dual or multi-molecule nucleic acid capable of interacting with and directing a base editor to a target polynucleotide sequence.

[0437] Typically, a guide polynucleotide (e.g., crRNA/trRNA complex or a gRNA) comprises a “polynucleotide-targeting segment” that includes a sequence capable of recognizing and binding to a target polynucleotide sequence, and a “protein-binding segment” that stabilizes the guide polynucleotide within a polynucleotide programmable nucleotide binding domain component of a base editor. In some embodiments, the polynucleotide targeting segment of the guide polynucleotide recognizes and binds to a DNA polynucleotide, thereby facilitating the editing of a base in DNA. In other cases, the polynucleotide targeting segment of the guide polynucleotide recognizes and binds to an RNA polynucleotide, thereby facilitating the editing of a base in RNA. Herein a “segment” refers to a section or region of a molecule, e.g., a contiguous stretch of nucleotides in the guide polynucleotide. A segment can also refer to a region/section of a complex such that a segment can comprise regions of more than one molecule. For example, where a guide polynucleotide comprises multiple nucleic acid molecules, the protein-binding segment of can include all or a portion of multiple separate molecules that are for instance hybridized along a region of complementarity. In some embodiments, a protein-binding segment of a DNA-targeting RNA that comprises two separate molecules can comprise (i) base pairs 40-75 of a first RNA molecule that is 100 base pairs in length; and (ii) base pairs 10-25 of a second RNA molecule that is 50 base pairs in length. The definition of “segment,” unless otherwise specifically defined in a particular context, is not limited to a specific number of total base pairs, is not limited to any particular number of base pairs from a given RNA molecule, is not limited to a particular number of separate molecules within a complex, and can include regions of RNA molecules that are of any total length and can include regions with complementarity to other molecules.

[0438] The guide polynucleotides can be synthesized chemically, synthesized enzymatically, or a combination thereof. For example, the gRNA can be synthesized using standard phosphoramidite-based solid-phase synthesis methods. Alternatively, the gRNA can be synthesized in vitro by operably linking DNA encoding the gRNA to a promoter control sequence that is recognized by a phage RNA polymerase. Examples of suitable phage promoter sequences include T7, T3, SP6 promoter sequences, or variations thereof. In embodiments in which the gRNA comprises two separate molecules (e.g., crRNA and tracrRNA), the crRNA can be chemically synthesized and the tracrRNA can be enzymatically synthesized. A gRNA molecule can be transcribed in vitro.

[0439] A guide polynucleotide may be expressed, for example, by a DNA that encodes the gRNA, e.g., a DNA vector comprising a sequence encoding the gRNA. The gRNA may be encoded alone or together with an encoded base editor. Such DNA sequences may be introduced into an expression system, e.g., a cell, together or separately. For example, DNA sequences encoding a polynucleotide programmable nucleotide binding domain and a gRNA may be introduced into a cell, each DNA sequence can be part of a separate molecule (e.g., one vector containing the polynucleotide programmable nucleotide binding domain coding sequence and a second vector containing the gRNA coding sequence) or both can be part of a same molecule (e.g., one vector containing coding (and regulatory) sequence for both the polynucleotide programmable nucleotide binding domain and the gRNA). An RNA can be transcribed from a synthetic DNA molecule, e.g., a gBlocks® gene fragment.

[0440] A gRNA or a guide polynucleotide can comprise three regions: a first region at the 5′ end that can be complementary to a target site in a chromosomal sequence, a second internal region that can form a stem loop structure, and a third 3′ region that can be single-stranded. A first region of each gRNA can also be different such that each gRNA guides a fusion protein to a specific target site. Further, second and third regions of each gRNA can be identical in all gRNAs.

[0441] A first region of a gRNA or a guide polynucleotide can be complementary to sequence at a target site in a chromosomal sequence such that the first region of the gRNA can base pair with the target site. In some cases, a first region of a gRNA can comprise from or from about 10 nucleotides to 25 nucleotides (i.e., from 10 nucleotides to nucleotides; or from about 10 nucleotides to about 25 nucleotides; or from 10 nucleotides to about 25 nucleotides; or from about 10 nucleotides to 25 nucleotides) or more. For example, a region of base pairing between a first region of a gRNA and a target site in a chromosomal sequence can be or can be about 10, 11, 12, 13, 14, 15, 16, 17, 18, 19, 20, 22, 23, 24, 25, or more nucleotides in length. Sometimes, a first region of a gRNA can be or can be about 19, 20, or 21 nucleotides in length.

[0442] A gRNA or a guide polynucleotide can also comprise a second region that forms a secondary structure. For example, a secondary structure formed by a gRNA can comprise a stem (or hairpin) and a loop. A length of a loop and a stem can vary. For example, a loop can range from or from about 3 to 10 nucleotides in length, and a stem can range from or from about 6 to 20 base pairs in length. A stem can comprise one or more bulges of 1 to 10 or about 10 nucleotides. The overall length of a second region can range from or from about 16 to 60 nucleotides in length. For example, a loop can be or can be about 4 nucleotides in length and a stem can be or can be about 12 base pairs.

[0443] A gRNA or a guide polynucleotide can also comprise a third region at the 3′ end that can be essentially single-stranded. For example, a third region is sometimes not complementarity to any chromosomal sequence in a cell of interest and is sometimes not complementarity to the rest of a gRNA. Further, the length of a third region can vary. A third region can be more than or more than about 4 nucleotides in length. For example, the length of a third region can range from or from about 5 to 60 nucleotides in length.

[0444] A gRNA or a guide polynucleotide can target any exon or intron of a gene target. In some cases, a guide can target exon 1 or 2 of a gene, in other cases; a guide can target exon 3 or 4 of a gene. In some embodiments, a composition comprises multiple gRNAs that all target the same exon or multiple gRNAs that target different exons. An exon and/or an intron of a gene can be targeted.

[0445] A gRNA or a guide polynucleotide can target a nucleic acid sequence of about 20 nucleotides or less than about 20 nucleotides (e.g., at least about 5, 10, 15, 16, 17, 18, 19, 20, 21, 22, 23, 24, 25, 30 nucleotides), or anywhere between about 1-100 nucleotides (e.g., 5, 10, 15, 16, 17, 18, 19, 20, 21, 22, 23, 24, 25, 30, 40, 50, 60, 70, 80, 90, 100). A target nucleic acid sequence can be or can be about 20 bases immediately 5′ of the first nucleotide of the PAM. A gRNA can target a nucleic acid sequence. A target nucleic acid can be at least or at least about 1-10, 1-20, 1-30, 1-40, 1-50, 1-60, 1-70, 1-80, 1-90, or 1-100 nucleotides.

[0446] Methods for selecting, designing, and validating guide polynucleotides, e.g., gRNAs and targeting sequences are described herein and known to those skilled in the art. For example, to minimize the impact of potential substrate promiscuity of a deaminase domain in the nucleobase editor system (e.g., an AID domain), the number of residues that could unintentionally be targeted for deamination (e.g., off-target C residues that could potentially reside on single strand DNA within the target nucleic acid locus) may be minimized. In addition, software tools can be used to optimize the gRNAs corresponding to a target nucleic acid sequence, e.g., to minimize total off-target activity across the genome. For example, for each possible targeting domain choice using S. pyogenes Cas9, all off-target sequences (preceding selected PAMs, e.g., NAG or NGG) may be identified across the genome that contain up to certain number (e.g., 1, 2, 3, 4, 5, 6, 7, 8, 9, or 10) of mismatched base-pairs. First regions of gRNAs complementary to a target site can be identified, and all first regions (e.g., crRNAs) can be ranked according to its total predicted off-target score; the top-ranked targeting domains represent those that are likely to have the greatest on-target and the least off-target activity. Candidate targeting gRNAs can be functionally evaluated by using methods known in the art and/or as set forth herein.

[0447] As a non-limiting example, target DNA hybridizing sequences in crRNAs of a gRNA for use with Cas9s may be identified using a DNA sequence searching algorithm. gRNA design is carried out using custom gRNA design software based on the public tool cas-offinder as described in Bae S., Park J., & Kim J.-S. Cas-OFFinder: A fast and versatile algorithm that searches for potential off-target sites of Cas9 RNA-guided endonucleases. Bioinformatics 30, 1473-1475 (2014). This software scores guides after calculating their genome-wide off-target propensity. Typically matches ranging from perfect matches to 7 mismatches are considered for guides ranging in length from 17 to 24. Once the off-target sites are computationally-determined, an aggregate score is calculated for each guide and summarized in a tabular output using a web-interface. In addition to identifying potential target sites adjacent to PAM sequences, the software also identifies all PAM adjacent sequences that differ by 1, 2, 3 or more than 3 nucleotides from the selected target sites. Genomic DNA sequences for a target nucleic acid sequence, e.g., a target gene may be obtained and repeat elements may be screened using publicly available tools, for example, the RepeatMasker program. RepeatMasker searches input DNA sequences for repeated elements and regions of low complexity. The output is a detailed annotation of the repeats present in a given query sequence.

[0448] Following identification, first regions of gRNAs, e.g., crRNAs, are ranked into tiers based on their distance to the target site, their orthogonality and presence of 5′ nucleotides for close matches with relevant PAM sequences (for example, a 5′ G based on identification of close matches in the human genome containing a relevant PAM e.g., NGG PAM for S. pyogenes, NNGRRT or NNGRRV PAM for S. aureus). As used herein, orthogonality refers to the number of sequences in the human genome that contain a minimum number of mismatches to the target sequence. A “high level of orthogonality” or “good orthogonality” may, for example, refer to 20-mer targeting domains that have no identical sequences in the human genome besides the intended target, nor any sequences that contain one or two mismatches in the target sequence. Targeting domains with good orthogonality may be selected to minimize off-target DNA cleavage.

[0449] A gRNA can then be introduced into a cell or embryo as an RNA molecule or a non-RNA nucleic acid molecule, e.g., DNA molecule. In one embodiment, a DNA encoding a gRNA is operably linked to promoter control sequence for expression of the gRNA in a cell or embryo of interest. A RNA coding sequence can be operably linked to a promoter sequence that is recognized by RNA polymerase III (Pol III). Plasmid vectors that can be used to express gRNA include, but are not limited to, px330 vectors and px333 vectors. In some cases, a plasmid vector (e.g., px333 vector) can comprise at least two gRNA-encoding DNA sequences. Further, a vector can comprise additional expression control sequences (e.g., enhancer sequences, Kozak sequences, polyadenylation sequences, transcriptional termination sequences, etc.), selectable marker sequences (e.g., GFP or antibiotic resistance genes such as puromycin), origins of replication, and the like. A DNA molecule encoding a gRNA can also be linear. A DNA molecule encoding a gRNA or a guide polynucleotide can also be circular.

[0450] In some embodiments, a reporter system is used for detecting base-editing activity and testing candidate guide polynucleotides. In some embodiments, a reporter system comprises a reporter gene based assay where base editing activity leads to expression of the reporter gene. For example, a reporter system may include a reporter gene comprising a deactivated start codon, e.g., a mutation on the template strand from 3′-TAC-5′ to 3′-CAC-5′. Upon successful deamination of the target C, the corresponding mRNA will be transcribed as 5′-AUG-3′ instead of 5′-GUG-3′, enabling the translation of the reporter gene. Suitable reporter genes will be apparent to those of skill in the art. Non-limiting examples of reporter genes include gene encoding green fluorescence protein (GFP), red fluorescence protein (RFP), luciferase, secreted alkaline phosphatase (SEAP), or any other gene whose expression are detectable and apparent to those skilled in the art. The reporter system can be used to test many different gRNAs, e.g., in order to determine which residue(s) with respect to the target DNA sequence the respective deaminase will target. sgRNAs that target non-template strand can also be tested in order to assess off-target effects of a specific base editing protein, e.g., a Cas9 deaminase fusion protein. In some embodiments, such gRNAs can be designed such that the mutated start codon will not be base-paired with the gRNA. The guide polynucleotides can comprise standard ribonucleotides, modified ribonucleotides (e.g., pseudouridine), ribonucleotide isomers, and/or ribonucleotide analogs. In some embodiments, the guide polynucleotide can comprise at least one detectable label. The detectable label can be a fluorophore (e.g., FAM, TMR, Cy3, Cy5, Texas Red, Oregon Green, Alexa Fluors, Halo tags, or suitable fluorescent dye), a detection tag (e.g., biotin, digoxigenin, and the like), quantum dots, or gold particles.

[0451] In some embodiments, a base editor system may comprise multiple guide polynucleotides, e.g., gRNAs. For example, the gRNAs may target to one or more target loci (e.g., at least 1 gRNA, at least 2 gRNA, at least 5 gRNA, at least 10 gRNA, at least 20 gRNA, at least 30 g RNA, at least 50 gRNA) comprised in a base editor system. The multiple gRNA sequences can be tandemly arranged and are preferably separated by a direct repeat.

[0452] A guide polynucleotide can comprise one or more modifications to provide a nucleic acid with a new or enhanced feature. A guide polynucleotide can comprise a nucleic acid affinity tag. A guide polynucleotide can comprise synthetic nucleotide, synthetic nucleotide analog, nucleotide derivatives, and/or modified nucleotides.

[0453] In some cases, a gRNA or a guide polynucleotide can comprise modifications. A modification can be made at any location of a gRNA or a guide polynucleotide. More than one modification can be made to a single gRNA or a guide polynucleotide. A gRNA or a guide polynucleotide can undergo quality control after a modification. In some cases, quality control can include PAGE, HPLC, MS, or any combination thereof.

[0454] A modification of a gRNA or a guide polynucleotide can be a substitution, insertion, deletion, chemical modification, physical modification, stabilization, purification, or any combination thereof.

[0455] A gRNA or a guide polynucleotide can also be modified by 5′ adenylate, 5′ guanosine-triphosphate cap, 5′ N7-Methylguanosine-triphosphate cap, 5 triphosphate cap, 3′ phosphate, 3′ thiophosphate, 5′ phosphate, 5′ thiophosphate, Cis-Syn thymidine dimer, trimers, C12 spacer, C3 spacer, C6 spacer, dSpacer, PC spacer, rSpacer, Spacer 18, Spacer 9, 3′-3′ modifications, 5′-5′ modifications, abasic, acridine, azobenzene, biotin, biotin BB, biotin TEG, cholesteryl TEG, desthiobiotin TEG, DNP TEG, DNP-X, DOTA, dT-Biotin, dual biotin, PC biotin, psoralen C2, psoralen C6, TINA, 3′ DABCYL, black hole quencher 1, black hole quencer 2, DABCYL SE, dT-DABCYL, IRDye QC-1, QSY-21, QSY-35, QSY-7, QSY-9, carboxyl linker, thiol linkers, 2′-deoxyribonucleoside analog purine, 2′-deoxyribonucleoside analog pyrimidine, ribonucleoside analog, 2′-O-methyl ribonucleoside analog, sugar modified analogs, wobble/universal bases, fluorescent dye label, 2′-fluoro RNA, 2′-O-methyl RNA, methylphosphonate, phosphodiester DNA, phosphodiester RNA, phosphothioate DNA, phosphorothioate RNA, UNA, pseudouridine-5′-triphosphate, 5′-methylcytidine-5′-triphosphate, or any combination thereof.

[0456] In some cases, a modification is permanent. In other cases, a modification is transient. In some cases, multiple modifications are made to a gRNA or a guide polynucleotide. A gRNA or a guide polynucleotide modification can alter physiochemical properties of a nucleotide, such as their conformation, polarity, hydrophobicity, chemical reactivity, base-pairing interactions, or any combination thereof.

[0457] A guide polynucleotide can be transferred into a cell by transfecting the cell with an isolated gRNA or a plasmid DNA comprising a sequence coding for the guide RNA and a promoter. A gRNA or a guide polynucleotide can also be transferred into a cell in other way, such as using virus-mediated gene delivery. A gRNA or a guide polynucleotide can be isolated. For example, a gRNA can be transfected in the form of an isolated RNA into a cell or organism. A gRNA can be prepared by in vitro transcription using any in vitro transcription system known in the art. A gRNA can be transferred to a cell in the form of isolated RNA rather than in the form of plasmid comprising encoding sequence for a gRNA.

[0458] A modification can also be a phosphorothioate substitute. In some cases, a natural phosphodiester bond can be susceptible to rapid degradation by cellular nucleases and; a modification of internucleotide linkage using phosphorothioate (PS) bond substitutes can be more stable towards hydrolysis by cellular degradation. A modification can increase stability in a gRNA or a guide polynucleotide. A modification can also enhance biological activity. In some cases, a phosphorothioate enhanced RNA gRNA can inhibit RNase A, RNase T1, calf serum nucleases, or any combinations thereof. These properties can allow the use of PS-RNA gRNAs to be used in applications where exposure to nucleases is of high probability in vivo or in vitro. For example, phosphorothioate (PS) bonds can be introduced between the last 3-5 nucleotides at the 5′- or “-end of a gRNA which can inhibit exonuclease degradation. In some cases, phosphorothioate bonds can be added throughout an entire gRNA to reduce attack by endonucleases.

[0459] In some embodiments, the guide RNA is designed to disrupt a splice site (i.e., a splice acceptor (SA) or a splice donor (SD). In some embodiments, the guide RNA is designed such that the base editing results in a premature STOP codon.

### Protospacer Adjacent Motif

[0460] The term “protospacer adjacent motif (PAM)” or PAM-like motif refers to a 2-6 base pair DNA sequence immediately following the DNA sequence targeted by the Cas9 nuclease in the CRISPR bacterial adaptive immune system. In some embodiments, the PAM can be a 5′ PAM (i.e., located upstream of the 5′ end of the protospacer). In other embodiments, the PAM can be a 3′ PAM (i.e., located downstream of the 5′ end of the protospacer). The PAM sequence is essential for target binding, but the exact sequence depends on a type of Cas protein. The PAM sequence can be any PAM sequence known in the art. Suitable PAM sequences include, but are not limited to, NGG, NGA, NGC, NGN, NGT, NGTT, NGCG, NGAG, NGAN, NGNG, NGCN, NGCG, NGTN, NNGRRT, NNNRRT, NNGRR(N), TTTV, TYCV, TYCV, TATV, NNNNGATT, NNAGAAW, or NAAAAC. Y is a pyrimidine; N is any nucleotide base; W is A or T.

[0461] A base editor provided herein can comprise a CRISPR protein-derived domain that is capable of binding a nucleotide sequence that contains a canonical or non-canonical protospacer adjacent motif (PAM) sequence. A PAM site is a nucleotide sequence in proximity to a target polynucleotide sequence. Some aspects of the disclosure provide for base editors comprising all or a portion of CRISPR proteins that have different PAM specificities.

[0462] For example, typically Cas9 proteins, such as Cas9 from S. pyogenes (spCas9), require a canonical NGG PAM sequence to bind a particular nucleic acid region, where the “N” in “NGG” is adenine (A), thymine (T), guanine (G), or cytosine (C), and the G is guanine. A PAM can be CRISPR protein-specific and can be different between different base editors comprising different CRISPR protein-derived domains. A PAM can be 5′ or 3′ of a target sequence. A PAM can be upstream or downstream of a target sequence. A PAM can be 1, 2, 3, 4, 5, 6, 7, 8, 9, 10 or more nucleotides in length. Often, a PAM is between 2-6 nucleotides in length.

[0463] In some embodiments, the PAM is an “NRN” PAM where the “N” in “NRN” is adenine (A), thymine (T), guanine (G), or cytosine (C), and the R is adenine (A) or guanine (G); or the PAM is an “NYN” PAM, wherein the “N” in NYN is adenine (A), thymine (T), guanine (G), or cytosine (C), and the Y is cytidine (C) or thymine (T), for example, as described in R. T. Walton et al., 2020, Science, 10.1126/science.aba8853 (2020), the entire contents of which are incorporated herein by reference.

[0464] Several PAM variants are described in Table 6 below.

TABLE 6
Cas9 proteins and corresponding PAM sequences

| Variant | PAM |
|---|---|
| spCas9 | NGG |
| spCas9-VRQR | NGA |
| spCas9-VRER | NGCG |
| xCas9 (sp) | NGN |
| saCas9 | NNGRRT |
| saCas9-KKH | NNNRRT |
| spCas9-MQKSER | NGCG |
| spCas9-MQKSER | NGCN |
| spCas9-LRKIQK | NGTN |
| spCas9-LRVSQK | NGTN |
| spCas9-LRVSQL | NGTN |
| spCas9-MQKFRAER | NGC |
| Cpf1 | 5′ (TTTV) |
| SpyMac | 5′-NAA-3′ |

[0465] In some embodiments, the PAM is NGC. In some embodiments, the NGC PAM is recognized by a Cas9 variant. In some embodiments, the NGC PAM variant includes one or more amino acid substitutions selected from D1135M, S1136Q, G1218K, E1219F, A1322R, D1332A, R1335E, and T1337R (collectively termed “MQKFRAER”).

[0466] In some embodiments, the PAM is NGT. In some embodiments, the NGT PAM is recognized by a Cas9 variant. In some embodiments, the NGT PAM variant is generated through targeted mutations at one or more residues 1335, 1337, 1135, 1136, 1218, and/or 1219. In some embodiments, the NGT PAM variant is created through targeted mutations at one or more residues 1219, 1335, 1337, 1218. In some embodiments, the NGT PAM variant is created through targeted mutations at one or more residues 1135, 1136, 1218, 1219, and 1335. In some embodiments, the NGT PAM variant is selected from the set of targeted mutations provided in Tables 7A and 7B below.

TABLE 7A
NGT PAM Variant Mutations at residues 1219,
1335, 1337, 1218

| Variant | E1219V | R1335Q | T1337 | G1218 |
|---|---|---|---|---|
| 1 | F | V | T | |
| 2 | F | V | R | |
| 3 | F | V | Q | |
| 4 | F | V | L | |
| 5 | F | V | T | R |
| 6 | F | V | R | R |
| 7 | F | V | Q | R |
| 8 | F | V | L | R |
| 9 | L | L | T | |
| 10 | L | L | R | |
| 11 | L | L | Q | |
| 12 | L | L | L | |
| 13 | F | I | T | |
| 14 | F | I | R | |
| 15 | F | I | Q | |
| 16 | F | I | L | |
| 17 | F | G | C | |
| 18 | H | L | N | |
| 19 | F | G | C | A |
| 20 | H | L | N | V |
| 21 | L | A | W | |
| 22 | L | A | F | |
| 23 | L | A | Y | |
| 24 | I | A | W | |
| 25 | I | A | F | |
| 26 | I | A | Y | |

TABLE 7B
NGT PAM Variant Mutations at residues 1135, 1136,
1218, 1219, and 1335

| Variant | D1135L | S1136R | G1218S | E1219V | R1335Q |
|---|---|---|---|---|---|
| 27 | G | | | | |
| 28 | V | | | | |
| 29 | I | | | | |
| 30 | | A | | | |
| 31 | | W | | | |
| 32 | | H | | | |
| 33 | | K | | | |
| 34 | | | K | | |
| 35 | | | R | | |
| 36 | | | Q | | |
| 37 | | | T | | |
| 38 | | | N | | |
| 39 | | | | I | |
| 40 | | | | A | |
| 41 | | | | N | |
| 42 | | | | Q | |
| 43 | | | | G | |
| 44 | | | | L | |
| 45 | | | | S | |
| 46 | | | | T | |
| 47 | | | | | L |
| 48 | | | | | I |
| 49 | | | | | V |
| 50 | | | | | N |
| 51 | | | | | S |
| 52 | | | | | T |
| 53 | | | | | F |
| 54 | | | | | Y |
| 55 | N1286Q | 11331F | | | |

[0467] In some embodiments, the NGT PAM variant is selected from variant 5, 7, 28, 31, or 36 in Table 7A and Table 7B. In some embodiments, the variants have improved NGT PAM recognition.

[0468] In some embodiments, the NGT PAM variants have mutations at residues 1219, 1335, 1337, and/or 1218. In some embodiments, the NGT PAM variant is selected with mutations for improved recognition from the variants provided in Table 8 below.

TABLE 8
NGT PAM Variant Mutations at residues 1219,
1335, 1337, and 1218

| Variant | E1219V | R1335Q | T1337 | G1218 |
|---|---|---|---|---|
| 1 | F | V | T | |
| 2 | F | V | R | |
| 3 | F | V | Q | |
| 4 | F | V | L | |
| 5 | F | V | T | R |
| 6 | F | V | R | R |
| 7 | F | V | Q | R |
| 8 | F | V | L | R |

[0469] In some embodiments, the NGT PAM is selected from the variants provided in Table 9 below.

TABLE 9
NGT PAM variants

| | NGTN | | | | | | | |
|---|---|---|---|---|---|---|---|---|
| | variant | D1135 | S1136 | G1218 | E1219 | A1322R | R1335 | T1337 |
| Variant 1 | LRKIQK | L | R | K | I | — | Q | K |
| Variant 2 | LRSVQK | L | R | S | V | — | Q | K |
| Variant 3 | LRSVQL | L | R | S | V | — | Q | L |
| Variant 4 | LRKIRQK | L | R | K | I | R | Q | K |
| Variant 5 | LRSVRQK | L | R | S | V | R | Q | K |
| Variant 6 | LRSVRQL | L | R | S | V | R | Q | L |

[0470] In some embodiments the NGTN variant is variant 1. In some embodiments, the NGTN variant is variant 2. In some embodiments, the NGTN variant is variant 3. In some embodiments, the NGTN variant is variant 4. In some embodiments, the NGTN variant is variant 5. In some embodiments, the NGTN variant is variant 6.

[0471] In some embodiments, the Cas9 domain is a Cas9 domain from Streptococcus pyogenes (SpCas9). In some embodiments, the SpCas9 domain is a nuclease active SpCas9, a nuclease inactive SpCas9 (SpCas9d), or a SpCas9 nickase (SpCas9n). In some embodiments, the SpCas9 comprises a D9X mutation, or a corresponding mutation in any of the amino acid sequences provided herein, wherein X is any amino acid except for D. In some embodiments, the SpCas9 comprises a D9A mutation, or a corresponding mutation in any of the amino acid sequences provided herein. In some embodiments, the SpCas9 domain, the SpCas9d domain, or the SpCas9n domain can bind to a nucleic acid sequence having a non-canonical PAM. In some embodiments, the SpCas9 domain, the SpCas9d domain, or the SpCas9n domain can bind to a nucleic acid sequence having an NGG, a NGA, or a NGCG PAM sequence.

[0472] In some embodiments, the SpCas9 domain comprises one or more of a D1135X, a R1335X, and a T1337X mutation, or a corresponding mutation in any of the amino acid sequences provided herein, wherein X is any amino acid. In some embodiments, the SpCas9 domain comprises one or more of a D1135E, R1335Q, and T1337R mutation, or a corresponding mutation in any of the amino acid sequences provided herein. In some embodiments, the SpCas9 domain comprises a D1135E, a R1335Q, and a T1337R mutation, or corresponding mutations in any of the amino acid sequences provided herein. In some embodiments, the SpCas9 domain comprises one or more of a D1135X, a R1335X, and a T1337X mutation, or a corresponding mutation in any of the amino acid sequences provided herein, wherein X is any amino acid. In some embodiments, the SpCas9 domain comprises one or more of a D1135V, a R1335Q, and a T1337R mutation, or a corresponding mutation in any of the amino acid sequences provided herein. In some embodiments, the SpCas9 domain comprises a D1135V, a R1335Q, and a T1337R mutation, or corresponding mutations in any of the amino acid sequences provided herein. In some embodiments, the SpCas9 domain comprises one or more of a D1135X, a G1218X, a R1335X, and a T1337X mutation, or a corresponding mutation in any of the amino acid sequences provided herein, wherein X is any amino acid. In some embodiments, the SpCas9 domain comprises one or more of a D1135V, a G1218R, a R1335Q, and a T1337R mutation, or a corresponding mutation in any of the amino acid sequences provided herein. In some embodiments, the SpCas9 domain comprises a D1135V, a G1218R, a R1335Q, and a T1337R mutation, or corresponding mutations in any of the amino acid sequences provided herein.

[0473] In some examples, a PAM recognized by a CRISPR protein-derived domain of a base editor disclosed herein can be provided to a cell on a separate oligonucleotide to an insert (e.g., an AAV insert) encoding the base editor. In such embodiments, providing PAM on a separate oligonucleotide can allow cleavage of a target sequence that otherwise would not be able to be cleaved, because no adjacent PAM is present on the same polynucleotide as the target sequence.

[0474] In an embodiment, S. pyogenes Cas9 (SpCas9) can be used as a CRISPR endonuclease for genome engineering. However, others can be used. In some embodiments, a different endonuclease can be used to target certain genomic targets. In some embodiments, synthetic SpCas9-derived variants with non-NGG PAM sequences can be used. Additionally, other Cas9 orthologues from various species have been identified and these “non-SpCas9s” can bind a variety of PAM sequences that can also be useful for the present disclosure. For example, the relatively large size of SpCas9 (approximately 4 kb coding sequence) can lead to plasmids carrying the SpCas9 cDNA that cannot be efficiently expressed in a cell. Conversely, the coding sequence for Staphylococcus aureus Cas9 (SaCas9) is approximately 1 kilobase shorter than SpCas9, possibly allowing it to be efficiently expressed in a cell. Similar to SpCas9, the SaCas9 endonuclease is capable of modifying target genes in mammalian cells in vitro and in mice in vivo. In some embodiments, a Cas protein can target a different PAM sequence. In some embodiments, a target gene can be adjacent to a Cas9 PAM, 5′-NGG, for example. In other embodiments, other Cas9 orthologs can have different PAM requirements. For example, other PAMs such as those of S. thermophilus (5′-NNAGAA for CRISPR1 and 5′-NGGNG for CRISPR3) and Neisseria meningitidis (5′-NNNNGATT) can also be found adjacent to a target gene.

[0475] In some embodiments, for a S. pyogenes system, a target gene sequence can precede (i.e., be 5′ to) a 5′-NGG PAM, and a 20-nt guide RNA sequence can base pair with an opposite strand to mediate a Cas9 cleavage adjacent to a PAM. In some embodiments, an adjacent cut can be or can be about 3 base pairs upstream of a PAM. In some embodiments, an adjacent cut can be or can be about 10 base pairs upstream of a PAM. In some embodiments, an adjacent cut can be or can be about 0-20 base pairs upstream of a PAM. For example, an adjacent cut can be next to, 1, 2, 3, 4, 5, 6, 7, 8, 9, 10, 11, 12, 13, 14, 15, 16, 17, 18, 19, 20, 21, 22, 23, 24, 25, 26, 27, 28, 29, or 30 base pairs upstream of a PAM. An adjacent cut can also be downstream of a PAM by 1 to 30 base pairs. The sequences of exemplary SpCas9 proteins capable of binding a PAM sequence follow:

[0476] In some embodiments, engineered SpCas9 variants are capable of recognizing protospacer adjacent motif (PAM) sequences flanked by a 3′ H (non-G PAM) (see Tables 2A-2D). In some embodiments, the SpCas9 variants recognize NRNH PAMs (where R is A or G and H is A, C or T). In some embodiments, the non-G PAM is NRRH, NRTH, or NRCH (see e.g., Miller, S. M., et al. Continuous evolution of SpCas9 variants compatible with non-G PAMs, Nat. Biotechnol. (2020), the contents of which is incorporated herein by reference in its entirety).

[0477] In some embodiments, the Cas9 domain is a recombinant Cas9 domain. In some embodiments, the recombinant Cas9 domain is a SpyMacCas9 domain. In some embodiments, the SpyMacCas9 domain is a nuclease active SpyMacCas9, a nuclease inactive SpyMacCas9 (SpyMacCas9d), or a SpyMacCas9 nickase (SpyMacCas9n). In some embodiments, the SaCas9 domain, the SaCas9d domain, or the SaCas9n domain can bind to a nucleic acid sequence having a non-canonical PAM. In some embodiments, the SpyMacCas9 domain, the SpCas9d domain, or the SpCas9n domain can bind to a nucleic acid sequence having a NAA PAM sequence.

[0478] The sequence of an exemplary Cas9 A homolog of Spy Cas9 in Streptococcus macacae with native 5′-NAAN-3′ PAM specificity is known in the art and described, for example, by Jakimo et al., (www.biorxiv.org/content/biorxiv/early/2018/09/27/429654.full.pdf), and is in the Sequence Listing as SEQ ID NO: 1307.

[0479] In some embodiments, a variant Cas9 protein harbors, H840A, P475A, W476A, N477A, D1125A, W1126A, and D1218A mutations such that the polypeptide has a reduced ability to cleave a target DNA or RNA. Such a Cas9 protein has a reduced ability to cleave a target DNA (e.g., a single stranded target DNA) but retains the ability to bind a target DNA (e.g., a single stranded target DNA). As another non-limiting example, in some embodiments, the variant Cas9 protein harbors D10A, H840A, P475A, W476A, N477A, D1125A, W1126A, and D1218A mutations such that the polypeptide has a reduced ability to cleave a target DNA. Such a Cas9 protein has a reduced ability to cleave a target DNA (e.g., a single stranded target DNA) but retains the ability to bind a target DNA (e.g., a single stranded target DNA). In some embodiments, when a variant Cas9 protein harbors W476A and W1126A mutations or when the variant Cas9 protein harbors P475A, W476A, N477A, D1125A, W1126A, and D1218A mutations, the variant Cas9 protein does not bind efficiently to a PAM sequence. Thus, in some such cases, when such a variant Cas9 protein is used in a method of binding, the method does not require a PAM sequence. In other words, in some embodiments, when such a variant Cas9 protein is used in a method of binding, the method can include a guide RNA, but the method can be performed in the absence of a PAM sequence (and the specificity of binding is therefore provided by the targeting segment of the guide RNA). Other residues can be mutated to achieve the above effects (i.e., inactivate one or the other nuclease portions). As non-limiting examples, residues D10, G12, G17, E762, H840, N854, N863, H982, H983, A984, D986, and/or A987 can be altered (i.e., substituted). Also, mutations other than alanine substitutions are suitable.

[0480] In some embodiments, a CRISPR protein-derived domain of a base editor can comprise all or a portion of a Cas9 protein with a canonical PAM sequence (NGG). In other embodiments, a Cas9-derived domain of a base editor can employ a non-canonical PAM sequence. Such sequences have been described in the art and would be apparent to the skilled artisan. For example, Cas9 domains that bind non-canonical PAM sequences have been described in Kleinstiver, B. P., et al., “Engineered CRISPR-Cas9 nucleases with altered PAM specificities” Nature 523, 481-485 (2015); and Kleinstiver, B. P., et al., “Broadening the targeting range of Staphylococcus aureus CRISPR-Cas9 by modifying PAM recognition” Nature Biotechnology 33, 1293-1298 (2015); R. T. Walton et al. “Unconstrained genome targeting with near-PAMless engineered CRISPR-Cas9 variants” Science 10.1126/science.aba8853 (2020); Hu et al. “Evolved Cas9 variants with broad PAM compatibility and high DNA specificity,” Nature, 2018 Apr. 5, 556(7699), 57-63; Miller et al., “Continuous evolution of SpCas9 variants compatible with non-G PAMs” Nat. Biotechnol., 2020 April; 38(4):471-481; the entire contents of each are hereby incorporated by reference.

Fusion Proteins Comprising a NapDNAbp and a Cytidine Deaminase and/or Adenosine Deaminase

[0481] Some aspects of the disclosure provide fusion proteins comprising a Cas9 domain or other nucleic acid programmable DNA binding protein (e.g., Cas12) and one or more cytidine deaminase or adenosine deaminase domains. It should be appreciated that the Cas9 domain may be any of the Cas9 domains or Cas9 proteins (e.g., dCas9 or nCas9) provided herein. In some embodiments, any of the Cas9 domains or Cas9 proteins (e.g., dCas9 or nCas9) provided herein may be fused with any of the cytidine deaminases and/or adenosine deaminases provided herein. The domains of the base editors disclosed herein can be arranged in any order.

[0482] In some embodiments, the fusion protein comprises the following domains A-C, A-D, or A-E:

[0483] NH₂-[A-B-C]-COOH;

[0484] NH₂-[A-B-C-D]-COOH; or

[0485] NH₂-[A-B-C-D-E]-COOH;

wherein A and C or A, C, and E, each comprises one or more of the following:

[0486] an adenosine deaminase domain or an active fragment thereof,

[0487] a cytidine deaminase domain or an active fragment thereof, and

[0488] wherein B or B and D, each comprises one or more domains having nucleic acid sequence specific binding activity.

[0489] In some embodiments, the fusion protein comprises the following structure:

[0490] NH₂-[Aₙ-Bₒ-Cₙ]-COOH;

[0491] NH₂-[Aₙ-Bₒ-Cₙ-Dₒ]-COOH; or

[0492] NH₂-[Aₙ-Bₒ-Cₚ-Dₒ-E_{q}]-COOH;

wherein A and C or A, C, and E, each comprises one or more of the following:

[0493] an adenosine deaminase domain or an active fragment thereof,

[0494] a cytidine deaminase domain or an active fragment thereof, and

wherein n is an integer: 1, 2, 3, 4, or 5, wherein p is an integer: 0, 1, 2, 3, 4, or 5; wherein q is an integer 0, 1, 2, 3, 4, or 5; and wherein B or B and D each comprises a domain having nucleic acid sequence specific binding activity; and wherein o is an integer: 1, 2, 3, 4, or 5.

[0495] For example, and without limitation, in some embodiments, the fusion protein comprises the structure:

NH2-[adenosine deaminase]-[Cas9 domain]-COOH;
NH2-[Cas9 domain]-[adenosine deaminase]-COOH;
NH2-[cytidine deaminase]-[Cas9 domain]-COOH;
NH2-[Cas9 domain]-[cytidine deaminase]-COOH;
NH2-[cytidine deaminase]-[Cas9 domain]-[adenosine deaminase]-COOH;
NH2-[adenosine deaminase]-[Cas9 domain]-[cytidine deaminase]-COOH;
NH2-[adenosine deaminase]-[cytidine deaminase]-[Cas9 domain]-COOH;
NH2-[cytidine deaminase]-[adenosine deaminase]-[Cas9 domain]-COOH;
NH2-[Cas9 domain]-[adenosine deaminase]-[cytidine deaminase]-COOH; or
NH2-[Cas9 domain]-[cytidine deaminase]-[adenosine deaminase]-COOH.

[0496] In some embodiments, any of the Cas12 domains or Cas12 proteins provided herein may be fused with any of the cytidine or adenosine deaminases provided herein. For example, and without limitation, in some embodiments, the fusion protein comprises the structure:

NH2-[adenosine deaminase]-[Cas12 domain]-COOH;
NH2-[Cas12 domain]-[adenosine deaminase]-COOH;
NH2-[cytidine deaminase]-[Cas12 domain]-COOH;
NH2-[Cas12 domain]-[cytidine deaminase]-COOH;
NH2-[cytidine deaminase]-[Cas12 domain]-[adenosine deaminase]-COOH;
NH2-[adenosine deaminase]-[Cas12 domain]-[cytidine deaminase]-COOH;
NH2-[adenosine deaminase]-[cytidine deaminase]-[Cas12 domain]-COOH;
NH2-[cytidine deaminase]-[adenosine deaminase]-[Cas12 domain]-COOH;
NH2-[Cas12 domain]-[adenosine deaminase]-[cytidine deaminase]-COOH; or
NH2-[Cas12 domain]-[cytidine deaminase]-[adenosine deaminase]-COOH.

[0497] In some embodiments, the adenosine deaminase is a TadA*8. Exemplary fusion protein structures include the following:

NH2-[TadA*8]-[Cas9 domain]-COOH;
NH2-[Cas9 domain]-[TadA*8]-COOH;
NH2-[TadA*8]-[Cas12 domain]-COOH; or
NH2-[Cas12 domain]-[TadA*8]-COOH.

[0498] In some embodiments, the adenosine deaminase of the fusion protein comprises a TadA*8 and a cytidine deaminase and/or an adenosine deaminase. In some embodiments, the TadA*8 is TadA*8.1, TadA*8.2, TadA*8.3, TadA*8.4, TadA*8.5, TadA*8.6, TadA*8.7, TadA*8.8, TadA*8.9, TadA*8.10, TadA*8.11, TadA*8.12, TadA*8.13, TadA*8.14, TadA*8.15, TadA*8.16, TadA*8.17, TadA*8.18, TadA*8.19, TadA*8.20, TadA*8.21, TadA*8.22, TadA*8.23, or TadA*8.24.

[0499] Exemplary fusion protein structures include the following:

NH2-[TadA*8]-[Cas9/Cas12]-[adenosine deaminase]-COOH;
NH2-[adenosine deaminase]-[Cas9/Cas12]-[TadA*8]-COOH;
NH2-[TadA*8]-[Cas9/Cas12]-[cytidine deaminase]-COOH; or
NH2-[cytidine deaminase]-[Cas9/Cas12]-[TadA*8]-COOH.

[0500] In some embodiments, the adenosine deaminase of the fusion protein comprises a TadA*9 and a cytidine deaminase and/or an adenosine deaminase. Exemplary fusion protein structures include the following:

NH2-[TadA*9]-[Cas9/Cas12]-[adenosine deaminase]-COOH;
NH2-[adenosine deaminase]-[Cas9/Cas12]-[TadA*9]-COOH;
NH2-[TadA*9]-[Cas9/Cas12]-[cytidine deaminase]-COOH; or
NH2-[cytidine deaminase]-[Cas9/Cas12]-[TadA*9]-COOH.

[0501] In some embodiments, the fusion protein can comprise a deaminase flanked by an N-terminal fragment and a C-terminal fragment of a Cas9 or Cas12 polypeptide. In some embodiments, the fusion protein comprises a cytidine deaminase flanked by an N-terminal fragment and a C-terminal fragment of a Cas9 or Cas12 polypeptide. In some embodiments, the fusion protein comprises an adenosine deaminase flanked by an N-terminal fragment and a C-terminal fragment of a Cas9 or Cas 12 polypeptide.

[0502] In some embodiments, the fusion proteins comprising a cytidine deaminase or adenosine deaminase and a napDNAbp (e.g., Cas9 or Cas12 domain) do not include a linker sequence. In some embodiments, a linker is present between the cytidine or adenosine deaminase and the napDNAbp. In some embodiments, the “-” used in the general architecture above indicates the presence of an optional linker. In some embodiments, cytidine or adenosine deaminase and the napDNAbp are fused via any of the linkers provided herein. For example, in some embodiments the cytidine or adenosine deaminase and the napDNAbp are fused via any of the linkers provided herein.

[0503] It should be appreciated that the fusion proteins of the present disclosure may comprise one or more additional features. For example, in some embodiments, the fusion protein may comprise inhibitors, cytoplasmic localization sequences, export sequences, such as nuclear export sequences, or other localization sequences, as well as sequence tags that are useful for solubilization, purification, or detection of the fusion proteins. Suitable protein tags provided herein include, but are not limited to, biotin carboxylase carrier protein (BCCP) tags, myc-tags, calmodulin-tags, FLAG-tags, hemagglutinin (HA)-tags, polyhistidine tags, also referred to as histidine tags or His-tags, maltose binding protein (MBP)-tags, nus-tags, glutathione-S-transferase (GST)-tags, green fluorescent protein (GFP)-tags, thioredoxin-tags, S-tags, Softags (e.g., Softag 1, Softag 3), strep-tags, biotin ligase tags, FlAsH tags, V5 tags, and SBP-tags. Additional suitable sequences will be apparent to those of skill in the art. In some embodiments, the fusion protein comprises one or more His tags.

[0504] Exemplary, yet nonlimiting, fusion proteins are described in International PCT Application Nos. PCT/2017/044935, PCT/US2019/044935, and PCT/US2020/016288, each of which is incorporated herein by reference for its entirety.

### Fusion Proteins Comprising a Nuclear Localization Sequence (NLS)

[0505] In some embodiments, the fusion proteins provided herein further comprise one or more (e.g., 2, 3, 4, 5) nuclear targeting sequences, for example a nuclear localization sequence (NLS). In one embodiment, a bipartite NLS is used. In some embodiments, a NLS comprises an amino acid sequence that facilitates the importation of a protein, that comprises an NLS, into the cell nucleus (e.g., by nuclear transport). In some embodiments, the NLS is fused to the N-terminus or the C-terminus of the fusion protein. In some embodiments, the NLS is fused to the C-terminus or N-terminus of an nCas9 domain or a dCas9 domain. In some embodiments, the NLS is fused to the N-terminus or C-terminus of the Cas12 domain. In some embodiments, the NLS is fused to the N-terminus or C-terminus of the cytidine or adenosine deaminase. In some embodiments, the NLS is fused to the fusion protein via one or more linkers. In some embodiments, the NLS is fused to the fusion protein without a linker. In some embodiments, the NLS comprises an amino acid sequence of any one of the NLS sequences provided or referenced herein. Additional nuclear localization sequences are known in the art and would be apparent to the skilled artisan. For example, NLS sequences are described in Plank et al., PCT/EP2000/011690, the contents of which are incorporated herein by reference for their disclosure of exemplary nuclear localization sequences. In some embodiments, an NLS comprises the amino acid sequence PKKKRKVEGADKRTADGSEFESPKKKRKV (SEQ ID NO: 83), KRTADGSEFESPKKKRKV (SEQ ID NO: 84), KRPAATKKAGQAKKKK (SEQ ID NO: 85), KKTELQTTNAENKTKKL (SEQ ID NO: 86), KRGINDRNFWRGENGRKTR (SEQ ID NO: 87), RKSGKIAAIVVKRPRKPKKKRKV (SEQ ID NO: 1424), or MDSLLMNRRKFLYQFKNVRWAKGRRETYLC (SEQ ID NO: 90).

[0506] In some embodiments, the fusion proteins comprising a cytidine or adenosine deaminase, a Cas9 domain, and an NLS do not comprise a linker sequence. In some embodiments, linker sequences between one or more of the domains or proteins (e.g., cytidine or adenosine deaminase, Cas9 domain or NLS) are present. In some embodiments, a linker is present between the cytidine deaminase and adenosine deaminase domains and the napDNAbp. In some embodiments, the “-” used in the general architecture below indicates the presence of an optional linker. In some embodiments, the cytidine deaminase and adenosine deaminase and the napDNAbp are fused via any of the linkers provided herein. For example, in some embodiments the cytidine deaminase and adenosine deaminase and the napDNAbp are fused via any of the linkers provided herein.

[0507] In some embodiments, the general architecture of exemplary napDNAbp (e.g., Cas9 or Cas12) fusion proteins with a cytidine or adenosine deaminase and a napDNAbp (e.g., Cas9 or Cas12) domain comprises any one of the following structures, where NLS is a nuclear localization sequence (e.g., any NLS provided herein), NH₂ is the N-terminus of the fusion protein, and COOH is the C-terminus of the fusion protein:

NH₂—NLS-[cytidine deaminase]-[napDNAbp domain]-COOH;
NH₂—NLS [napDNAbp domain]-[cytidine deaminase]-COOH;
NH₂-[cytidine deaminase]-[napDNAbp domain]-NLS—COOH;
NH₂-[napDNAbp domain]-[cytidine deaminase]-NLS—COOH;
NH₂—NLS-[adenosine deaminase]-[napDNAbp domain]-COOH;
NH₂—NLS [napDNAbp domain]-[adenosine deaminase]-COOH;
NH₂-[adenosine deaminase]-[napDNAbp domain]-NLS—COOH;
NH₂-[napDNAbp domain]-[adenosine deaminase]-NLS—COOH;
NH₂—NLS-[cytidine deaminase]-[napDNAbp domain]-[adenosine deaminase]-COOH;
NH₂—NLS-[adenosine deaminase]-[napDNAbp domain]-[cytidine deaminase]-COOH;
NH₂—NLS-[adenosine deaminase] [cytidine deaminase]-[napDNAbp domain]-COOH;
NH₂—NLS-[cytidine deaminase]-[adenosine deaminase]-[napDNAbp domain]-COOH;
NH₂—NLS-[napDNAbp domain]-[adenosine deaminase]-[cytidine deaminase]-COOH;
NH₂—NLS-[napDNAbp domain]-[cytidine deaminase]-[adenosine deaminase]-COOH;
NH₂-[cytidine deaminase]-[napDNAbp domain]-[adenosine deaminase]-NLS—COOH;
NH₂-[adenosine deaminase]-[napDNAbp domain]-[cytidine deaminase]-NLS—COOH;
NH₂-[adenosine deaminase] [cytidine deaminase]-[napDNAbp domain]-NLS—COOH;
NH₂-[cytidine deaminase]-[adenosine deaminase]-[napDNAbp domain]-NLS—COOH;
NH₂-[napDNAbp domain]-[adenosine deaminase]-[cytidine deaminase]-NLS—COOH; or

[0508] NH₂-[napDNAbp domain]-[cytidine deaminase]-[adenosine deaminase]-NLS—COOH. In some embodiments, the NLS is present in a linker or the NLS is flanked by linkers, for example described herein. A bipartite NLS comprises two basic amino acid clusters, which are separated by a relatively short spacer sequence (hence bipartite—2 parts, while monopartite NLSs are not). The NLS of nucleoplasmin, KR[PAATKKAGQA]KKKK (SEQ ID NO: 85), is the prototype of the ubiquitous bipartite signal: two clusters of basic amino acids, separated by a spacer of about 10 amino acids. The sequence of an exemplary bipartite NLS follows:

(SEQ ID NO: 83)
PKKKRKVEGADKRTADGSEFESPKKKRKV

[0509] A vector that encodes a CRISPR enzyme comprising one or more nuclear localization sequences (NLSs) can be used. For example, there can be or be about 1, 2, 3, 4, 5, 6, 7, 8, 9, 10 NLSs used. A CRISPR enzyme can comprise the NLSs at or near the amino-terminus, about or more than about 1, 2, 3, 4, 5, 6, 7, 8, 9, 10 NLSs at or near the carboxy-terminus, or any combination thereof (e.g., one or more NLS at the amino-terminus and one or more NLS at the carboxy terminus). When more than one NLS is present, each can be selected independently of others, such that a single NLS can be present in more than one copy and/or in combination with one or more other NLSs present in one or more copies.

[0510] CRISPR enzymes used in the methods can comprise about 6 NLSs. An NLS is considered near the N- or C-terminus when the nearest amino acid to the NLS is within about 50 amino acids along a polypeptide chain from the N- or C-terminus, e.g., within 1, 2, 3, 4, 5, 10, 15, 20, 25, 30, 40, or 50 amino acids.

### Additional Domains

[0511] A base editor described herein can include any domain which helps to facilitate the nucleobase editing, modification or altering of a nucleobase of a polynucleotide. In some embodiments, a base editor comprises a polynucleotide programmable nucleotide binding domain (e.g., Cas9), a nucleobase editing domain (e.g., deaminase domain), and one or more additional domains. In some embodiments, the additional domain can facilitate enzymatic or catalytic functions of the base editor, binding functions of the base editor, or be inhibitors of cellular machinery (e.g., enzymes) that could interfere with the desired base editing result. In some embodiments, a base editor can comprise a nuclease, a nickase, a recombinase, a deaminase, a methyltransferase, a methylase, an acetylase, an acetyltransferase, a transcriptional activator, or a transcriptional repressor domain.

[0512] In some embodiments, a base editor can comprise an uracil glycosylase inhibitor (UGI) domain. In some embodiments, cellular DNA repair response to the presence of U: G heteroduplex DNA can be responsible for a decrease in nucleobase editing efficiency in cells. In such embodiments, uracil DNA glycosylase (UDG) can catalyze removal of U from DNA in cells, which can initiate base excision repair (BER), mostly resulting in reversion of the U:G pair to a C:G pair. In such embodiments, BER can be inhibited in base editors comprising one or more domains that bind the single strand, block the edited base, inhibit UGI, inhibit BER, protect the edited base, and/or promote repairing of the non-edited strand. Thus, this disclosure contemplates a base editor fusion protein comprising a UGI domain.

[0513] In some embodiments, a base editor comprises as a domain all or a portion of a double-strand break (DSB) binding protein. For example, a DSB binding protein can include a Gam protein of bacteriophage Mu that can bind to the ends of DSBs and can protect them from degradation. See Komor, A. C., et aL., “Improved base excision repair inhibition and bacteriophage Mu Gam protein yields C:G-to-T:A base editors with higher efficiency and product purity” Science Advances 3:eaao4774 (2017), the entire content of which is hereby incorporated by reference.

[0514] Additionally, in some embodiments, a Gam protein can be fused to an N terminus of a base editor. In some embodiments, a Gam protein can be fused to a C terminus of a base editor. The Gam protein of bacteriophage Mu can bind to the ends of double strand breaks (DSBs) and protect them from degradation. In some embodiments, using Gam to bind the free ends of DSB can reduce indel formation during the process of base editing. In some embodiments, 174-residue Gam protein is fused to the N terminus of the base editors. See Komor, A. C., et al., “Improved base excision repair inhibition and bacteriophage Mu Gam protein yields C:G-to-T:A base editors with higher efficiency and product purity” Science Advances 3:eaao4774 (2017). In some embodiments, a mutation or mutations can change the length of a base editor domain relative to a wild type domain. For example, a deletion of at least one amino acid in at least one domain can reduce the length of the base editor. In another case, a mutation or mutations do not change the length of a domain relative to a wild type domain. For example, substitutions in any domain does not change the length of the base editor.

[0515] Non-limiting examples of such base editors, where the length of all the domains is the same as the wild type domains, can include:

NH2-[nucleobase editing domain]-Linker1-[APOBEC1]-Linker2-[nucleobase editing domain]-COOH;
NH2-[nucleobase editing domain]-Linker1-[APOBEC1]-[nucleobase editing domain]-COOH;
NH2-[nucleobase editing domain]-[APOBEC1]-Linker2-[nucleobase editing domain]-COOH;
NH2-[nucleobase editing domain]-[APOBEC1]-[nucleobase editing domain]-COOH;
NH2-[nucleobase editing domain]-Linker1-[APOBEC1]-Linker2-[nucleobase editing domain]-[UGI]-COOH;
NH2-[nucleobase editing domain]-Linker1-[APOBEC1]-[nucleobase editing domain]-[UGI]-COOH;
NH2-[nucleobase editing domain]-[APOBEC1]-Linker2-[nucleobase editing domain]-[UGI]-COOH;
NH2-[nucleobase editing domain]-[APOBEC1]-[nucleobase editing domain]-[UGI]-COOH;
NH2-[UGI]-[nucleobase editing domain]-Linker1-[APOBEC1]-Linker2-[nucleobase editing domain]-COOH;
NH2-[UGI]-[nucleobase editing domain]-Linker1-[APOBEC1]-[nucleobase editing domain]-COOH;
NH2-[UGI]-[nucleobase editing domain]-[APOBEC1]-Linker2-[nucleobase editing domain]-COOH; or
NH2-[UGI]-[nucleobase editing domain]-[APOBEC1]-[nucleobase editing domain]-COOH.

### E. Base Editor System

[0516] Provided herein are systems, compositions, and methods for editing a nucleobase using a base editor system. In some embodiments, the base editor system comprises (1) a base editor (BE) comprising a polynucleotide programmable nucleotide binding domain and a nucleobase editing domain (e.g., a deaminase domain) for editing the nucleobase; and (2) a guide polynucleotide (e.g., guide RNA) in conjunction with the polynucleotide programmable nucleotide binding domain. In some embodiments, the base editor system is a cytidine base editor (CBE) or an adenosine base editor (ABE). In some embodiments, the polynucleotide programmable nucleotide binding domain is a polynucleotide programmable DNA or RNA binding domain. In some embodiments, the nucleobase editing domain is a deaminase domain. In some embodiments, a deaminase domain can be a cytidine deaminase or an cytosine deaminase. In some embodiments, a deaminase domain can be an adenine deaminase or an adenosine deaminase. In some embodiments, the adenosine base editor can deaminate adenine in DNA. In some embodiments, the base editor is capable of deaminating a cytidine in DNA.

[0517] In some embodiments, a base editing system as provided herein provides a new approach to genome editing that uses a fusion protein containing a catalytically defective Streptococcus pyogenes Cas9, a deaminase (e.g., cytidine or adenosine deaminase), and an inhibitor of base excision repair to induce programmable, single nucleotide (C→T or A→G) changes in DNA without generating double-strand DNA breaks, without requiring a donor DNA template, and without inducing an excess of stochastic insertions and deletions.

[0518] Details of nucleobase editing proteins are described in International PCT Application Nos. PCT/2017/045381 (WO2018/027078) and PCT/US2016/058344 (WO2017/070632), each of which is incorporated herein by reference for its entirety. Also see Komor, A. C., et al., “Programmable editing of a target base in genomic DNA without double-stranded DNA cleavage” Nature 533, 420-424 (2016); Gaudelli, N. M., et al., “Programmable base editing of A•T to G•C in genomic DNA without DNA cleavage” Nature 551, 464-471 (2017); and Komor, A. C., et al., “Improved base excision repair inhibition and bacteriophage Mu Gam protein yields C:G-to-T:A base editors with higher efficiency and product purity” Science Advances 3:eaao4774 (2017), the entire contents of which are hereby incorporated by reference.

[0519] Use of the base editor system provided herein comprises the steps of: (a) contacting a target nucleotide sequence of a polynucleotide (e.g., double- or single stranded DNA or RNA) of a subject with a base editor system comprising a nucleobase editor (e.g., an adenosine base editor or a cytidine base editor) and a guide polynucleic acid (e.g., gRNA), wherein the target nucleotide sequence comprises a targeted nucleobase pair; (b) inducing strand separation of said target region; (c) converting a first nucleobase of said target nucleobase pair in a single strand of the target region to a second nucleobase; and (d) cutting no more than one strand of said target region, where a third nucleobase complementary to the first nucleobase base is replaced by a fourth nucleobase complementary to the second nucleobase. It should be appreciated that in some embodiments, step (b) is omitted. In some embodiments, said targeted nucleobase pair is a plurality of nucleobase pairs in one or more genes. In some embodiments, the base editor system provided herein is capable of multiplex editing of a plurality of nucleobase pairs in one or more genes. In some embodiments, the plurality of nucleobase pairs is located in the same gene. In some embodiments, the plurality of nucleobase pairs is located in one or more genes, wherein at least one gene is located in a different locus.

[0520] In some embodiments, the cut single strand (nicked strand) is hybridized to the guide nucleic acid. In some embodiments, the cut single strand is opposite to the strand comprising the first nucleobase. In some embodiments, the base editor comprises a Cas9 domain. In some embodiments, the first base is adenine, and the second base is not a G, C, A, or T. In some embodiments, the second base is inosine.

[0521] In some embodiments, a single guide polynucleotide may be utilized to target a deaminase to a target nucleic acid sequence. In some embodiments, a single pair of guide polynucleotides may be utilized to target different deaminases to a target nucleic acid sequence.

[0522] The nucleobase components and the polynucleotide programmable nucleotide binding component of a base editor system may be associated with each other covalently or non-covalently. For example, in some embodiments, the deaminase domain can be targeted to a target nucleotide sequence by a polynucleotide programmable nucleotide binding domain. In some embodiments, a polynucleotide programmable nucleotide binding domain can be fused or linked to a deaminase domain. In some embodiments, a polynucleotide programmable nucleotide binding domain can target a deaminase domain to a target nucleotide sequence by non-covalently interacting with or associating with the deaminase domain. For example, in some embodiments, the nucleobase editing component, e.g., the deaminase component can comprise an additional heterologous portion or domain that is capable of interacting with, associating with, or capable of forming a complex with an additional heterologous portion or domain that is part of a polynucleotide programmable nucleotide binding domain. In some embodiments, the additional heterologous portion may be capable of binding to, interacting with, associating with, or forming a complex with a polypeptide. In some embodiments, the additional heterologous portion may be capable of binding to, interacting with, associating with, or forming a complex with a polynucleotide. In some embodiments, the additional heterologous portion may be capable of binding to a guide polynucleotide. In some embodiments, the additional heterologous portion may be capable of binding to a polypeptide linker. In some embodiments, the additional heterologous portion may be capable of binding to a polynucleotide linker. The additional heterologous portion may be a protein domain. In some embodiments, the additional heterologous portion may be a K Homology (KH) domain, a MS2 coat protein domain, a PP7 coat protein domain, a SfMu Com coat protein domain, a steril alpha motif, a telomerase Ku binding motif and Ku protein, a telomerase Sm7 binding motif and Sm7 protein, or an RNA recognition motif.

[0523] A base editor system may further comprise a guide polynucleotide component. It should be appreciated that components of the base editor system may be associated with each other via covalent bonds, noncovalent interactions, or any combination of associations and interactions thereof. In some embodiments, a deaminase domain can be targeted to a target nucleotide sequence by a guide polynucleotide. For example, in some embodiments, the nucleobase editing component of the base editor system, e.g., the deaminase component, can comprise an additional heterologous portion or domain (e.g., polynucleotide binding domain such as an RNA or DNA binding protein) that is capable of interacting with, associating with, or capable of forming a complex with a portion or segment (e.g., a polynucleotide motif) of a guide polynucleotide. In some embodiments, the additional heterologous portion or domain (e.g., polynucleotide binding domain such as an RNA or DNA binding protein) can be fused or linked to the deaminase domain. In some embodiments, the additional heterologous portion may be capable of binding to, interacting with, associating with, or forming a complex with a polypeptide. In some embodiments, the additional heterologous portion may be capable of binding to, interacting with, associating with, or forming a complex with a polynucleotide. In some embodiments, the additional heterologous portion may be capable of binding to a guide polynucleotide. In some embodiments, the additional heterologous portion may be capable of binding to a polypeptide linker. In some embodiments, the additional heterologous portion may be capable of binding to a polynucleotide linker. The additional heterologous portion may be a protein domain. In some embodiments, the additional heterologous portion may be a K Homology (KH) domain, a MS2 coat protein domain, a PP7 coat protein domain, a SfMu Com coat protein domain, a sterile alpha motif, a telomerase Ku binding motif and Ku protein, a telomerase Sm7 binding motif and Sm7 protein, or an RNA recognition motif.

[0524] In some embodiments, a base editor system can further comprise an inhibitor of base excision repair (BER) component. It should be appreciated that components of the base editor system may be associated with each other via covalent bonds, noncovalent interactions, or any combination of associations and interactions thereof. The inhibitor of BER component may comprise a base excision repair inhibitor. In some embodiments, the inhibitor of base excision repair can be an uracil DNA glycosylase inhibitor (UGI). In some embodiments, the inhibitor of base excision repair can be an inosine base excision repair inhibitor. In some embodiments, the inhibitor of base excision repair can be targeted to the target nucleotide sequence by the polynucleotide programmable nucleotide binding domain. In some embodiments, a polynucleotide programmable nucleotide binding domain can be fused or linked to an inhibitor of base excision repair. In some embodiments, a polynucleotide programmable nucleotide binding domain can be fused or linked to a deaminase domain and an inhibitor of base excision repair. In some embodiments, a polynucleotide programmable nucleotide binding domain can target an inhibitor of base excision repair to a target nucleotide sequence by non-covalently interacting with or associating with the inhibitor of base excision repair. For example, in some embodiments, the inhibitor of base excision repair component can comprise an additional heterologous portion or domain that is capable of interacting with, associating with, or capable of forming a complex with an additional heterologous portion or domain that is part of a polynucleotide programmable nucleotide binding domain. In some embodiments, the inhibitor of base excision repair can be targeted to the target nucleotide sequence by the guide polynucleotide. For example, in some embodiments, the inhibitor of base excision repair can comprise an additional heterologous portion or domain (e.g., polynucleotide binding domain such as an RNA or DNA binding protein) that is capable of interacting with, associating with, or capable of forming a complex with a portion or segment (e.g., a polynucleotide motif) of a guide polynucleotide. In some embodiments, the additional heterologous portion or domain of the guide polynucleotide (e.g., polynucleotide binding domain such as an RNA or DNA binding protein) can be fused or linked to the inhibitor of base excision repair. In some embodiments, the additional heterologous portion may be capable of binding to, interacting with, associating with, or forming a complex with a polynucleotide. In some embodiments, the additional heterologous portion may be capable of binding to a guide polynucleotide. In some embodiments, the additional heterologous portion may be capable of binding to a polypeptide linker. In some embodiments, the additional heterologous portion may be capable of binding to a polynucleotide linker. The additional heterologous portion may be a protein domain. In some embodiments, the additional heterologous portion may be a K Homology (KH) domain, a MS2 coat protein domain, a PP7 coat protein domain, a SfMu Com coat protein domain, a sterile alpha motif, a telomerase Ku binding motif and Ku protein, a telomerase Sm7 binding motif and Sm7 protein, or an RNA recognition motif.

[0525] In some embodiments, the base editor inhibits base excision repair (BER) of the edited strand. In some embodiments, the base editor protects or binds the non-edited strand. In some embodiments, the base editor comprises UGI activity. In some embodiments, the base editor comprises a catalytically inactive inosine-specific nuclease. In some embodiments, the base editor comprises nickase activity. In some embodiments, the intended edit of base pair is upstream of a PAM site. In some embodiments, the intended edit of base pair is 1, 2, 3, 4, 5, 6, 7, 8, 9, 10, 11, 12, 13, 14, 15, 16, 17, 18, 19, or 20 nucleotides upstream of the PAM site. In some embodiments, the intended edit of base-pair is downstream of a PAM site. In some embodiments, the intended edited base pair is 1, 2, 3, 4, 5, 6, 7, 8, 9, 10, 11, 12, 13, 14, 15, 16, 17, 18, 19, or 20 nucleotides downstream stream of the PAM site.

[0526] In some embodiments, the method does not require a canonical (e.g., NGG) PAM site. In some embodiments, the nucleobase editor comprises a linker or a spacer. In some embodiments, the linker or spacer is 1-25 amino acids in length. In some embodiments, the linker or spacer is 5-20 amino acids in length. In some embodiments, the linker or spacer is 10, 11, 12, 13, 14, 15, 16, 17, 18, 19, or 20 amino acids in length.

[0527] In some embodiments, the base editing fusion proteins provided herein need to be positioned at a precise location, for example, where a target base is placed within a defined region (e.g., a “deamination window”). In some embodiments, a target can be within a 4 base region. In some embodiments, such a defined target region can be approximately 15 bases upstream of the PAM. See Komor, A. C., et al., “Programmable editing of a target base in genomic DNA without double-stranded DNA cleavage” Nature 533, 420-424 (2016); Gaudelli, N. M., et al., “Programmable base editing of A•T to G•C in genomic DNA without DNA cleavage” Nature 551, 464-471 (2017); and Komor, A. C., et al., “Improved base excision repair inhibition and bacteriophage Mu Gam protein yields C:G-to-T:A base editors with higher efficiency and product purity” Science Advances 3:eaao4774 (2017), the entire contents of which are hereby incorporated by reference.

[0528] In some embodiments, the target region comprises a target window, wherein the target window comprises the target nucleobase pair. In some embodiments, the target window comprises 1-10 nucleotides. In some embodiments, the target window is 1, 2, 3, 4, 5, 6, 7, 8, 9, 10, 11, 12, 13, 14, 15, 16, 17, 18, 19, or 20 nucleotides in length. In some embodiments, the intended edit of base pair is within the target window. In some embodiments, the target window comprises the intended edit of base pair. In some embodiments, the method is performed using any of the base editors provided herein. In some embodiments, a target window is a deamination window. A deamination window can be the defined region in which a base editor acts upon and deaminates a target nucleotide. In some embodiments, the deamination window is within a 2, 3, 4, 5, 6, 7, 8, 9, or 10 base regions. In some embodiments, the deamination window is 5, 6, 7, 8, 9, 10, 11, 12, 13, 14, 15, 16, 17, 18, 19, 20, 21, 22, 23, 24, or 25 bases upstream of the PAM.

[0529] The base editors of the present disclosure can comprise any domain, feature or amino acid sequence which facilitates the editing of a target polynucleotide sequence. For example, in some embodiments, the base editor comprises a nuclear localization sequence (NLS). In some embodiments, an NLS of the base editor is localized between a deaminase domain and a polynucleotide programmable nucleotide binding domain. In some embodiments, an NLS of the base editor is localized C-terminal to a polynucleotide programmable nucleotide binding domain.

[0530] Other exemplary features that can be present in a base editor as disclosed herein are localization sequences, such as cytoplasmic localization sequences, export sequences, such as nuclear export sequences, or other localization sequences, as well as sequence tags that are useful for solubilization, purification, or detection of the fusion proteins. Suitable protein tags provided herein include, but are not limited to, biotin carboxylase carrier protein (BCCP) tags, myc-tags, calmodulin-tags, FLAG-tags, hemagglutinin (HA)-tags, polyhistidine tags, also referred to as histidine tags or His-tags, maltose binding protein (MBP)-tags, nus-tags, glutathione-S-transferase (GST)-tags, green fluorescent protein (GFP)-tags, thioredoxin-tags, S-tags, Softags (e.g., Softag 1, Softag 3), strep-tags, biotin ligase tags, FlAsH tags, V5 tags, and SBP-tags. Additional suitable sequences will be apparent to those of skill in the art. In some embodiments, the fusion protein comprises one or more His tags.

[0531] In some embodiments, non-limiting exemplary cytidine base editors (CBE) include BE1 (APOBEC1-XTEN-dCas9), BE2 (APOBEC1-XTEN-dCas9-UGI), BE3 (APOBEC1-XTEN-dCas9(A840H)-UGI), BE3-Gam, saBE3, saBE4-Gam, BE4, BE4-Gam, saBE4, or saB4E-Gam. BE4 extends the APOBEC1-Cas9n(D10A) linker to 32 amino acids and the Cas9n-UGI linker to 9 amino acids, and appends a second copy of UGI to the C-terminus of the construct with another 9-amino acid linker into a single base editor construct. The base editors saBE3 and saBE4 have the S. pyogenes Cas9n(D10A) replaced with the smaller S. aureus Cas9n(D10A). BE3-Gam, saBE3-Gam, BE4-Gam, and saBE4-Gam have 174 residues of Gam protein fused to the N-terminus of BE3, saBE3, BE4, and saBE4 via the 16 amino acid XTEN linker.

[0532] In some embodiments, the adenosine base editor (ABE) can deaminate adenine in DNA. In some embodiments, ABE is generated by replacing APOBEC1 component of BE3 with natural or engineered E. coli TadA, human ADAR2, mouse ADA, or human ADAT2. In some embodiments, ABE comprises evolved TadA variant. In some embodiments, the ABE is ABE 1.2 (TadA*-XTEN-nCas9-NLS). In some embodiments, TadA* comprises A106V and D108N mutations.

[0533] In some embodiments, the ABE is a second-generation ABE. In some embodiments, the ABE is ABE2.1, which comprises additional mutations D147Y and E155V in TadA* (TadA*2.1). In some embodiments, the ABE is ABE2.2, ABE2.1 fused to catalytically inactivated version of human alkyl adenine DNA glycosylase (AAG with E125Q mutation). In some embodiments, the ABE is ABE2.3, ABE2.1 fused to catalytically inactivated version of E. coli Endo V (inactivated with D35A mutation). In some embodiments, the ABE is ABE2.6 which has a linker twice as long (32 amino acids, (SGGS)₂ (SEQ ID NO: 1425)-XTEN-(SGGS)₂ (SEQ ID NO: 1425)) as the linker in ABE2.1. In some embodiments, the ABE is ABE2.7, which is ABE2.1 tethered with an additional wild-type TadA monomer. In some embodiments, the ABE is ABE2.8, which is ABE2.1 tethered with an additional TadA*2.1 monomer. In some embodiments, the ABE is ABE2.9, which is a direct fusion of evolved TadA (TadA*2.1) to the N-terminus of ABE2.1. In some embodiments, the ABE is ABE2.10, which is a direct fusion of wild-type TadA to the N-terminus of ABE2.1. In some embodiments, the ABE is ABE2.11, which is ABE2.9 with an inactivating E59A mutation at the N-terminus of TadA* monomer. In some embodiments, the ABE is ABE2.12, which is ABE2.9 with an inactivating E59A mutation in the internal TadA* monomer.

[0534] In some embodiments, the ABE is a third generation ABE. In some embodiments, the ABE is ABE3.1, which is ABE2.3 with three additional TadA mutations (L84F, H123Y, and I156F).

[0535] In some embodiments, the ABE is a fourth generation ABE. In some embodiments, the ABE is ABE4.3, which is ABE3.1 with an additional TadA mutation A142N (TadA*4.3).

[0536] In some embodiments, the ABE is a fifth generation ABE. In some embodiments, the ABE is ABE5.1, which is generated by importing a consensus set of mutations from surviving clones (H36L, R51L, S146C, and K157N) into ABE3.1. In some embodiments, the ABE is ABE5.3, which has a heterodimeric construct containing wild-type E. coli TadA fused to an internal evolved TadA*. In some embodiments, the ABE is ABE5.2, ABE5.4, ABE5.5, ABE5.6, ABE5.7, ABE5.8, ABE5.9, ABE5.10, ABE5.11, ABE5.12, ABE5.13, or ABE5.14, as shown in Table 10 below. In some embodiments, the ABE is a sixth generation ABE. In some embodiments, the ABE is ABE6.1, ABE6.2, ABE6.3, ABE6.4, ABE6.5, or ABE6.6, as shown in Table 10 below. In some embodiments, the ABE is a seventh generation ABE. In some embodiments, the ABE is ABE7.1, ABE7.2, ABE7.3, ABE7.4, ABE7.5, ABE7.6, ABE7.7, ABE7.8, ABE 7.9, or ABE7.10, as shown in Table 10 below.

TABLE 10
Genotypes of ABEs

| | 23 | 26 | 36 | 37 | 48 | 49 | 51 | 72 | 84 | 87 | 106 | 108 | 123 | 125 | 142 | 146 | 147 | 152 | 155 | 156 | 157 | 161 |
|---|---|---|---|---|---|---|---|---|---|---|---|---|---|---|---|---|---|---|---|---|---|---|
| ABE0.1 | W | R | H | N | P | | R | N | L | S | A | D | H | G | A | S | D | R | E | | K | K |
| ABE0.2 | W | R | H | N | P | | R | N | L | S | A | D | H | G | A | S | D | R | E | | K | K |
| ABE1.1 | W | R | H | N | P | | R | N | L | S | A | N | H | G | A | S | D | R | E | | K | K |
| ABE1.2 | W | R | H | N | P | | R | N | L | S | V | N | H | G | A | S | D | R | E | | K | K |
| ABE2.1 | W | R | H | N | P | | R | N | L | S | V | N | H | G | A | S | Y | R | V | | K | K |
| ABE2.2 | W | R | H | N | P | | R | N | L | S | V | N | H | G | A | S | Y | R | V | | K | K |
| ABE2.3 | W | R | H | N | P | | R | N | L | S | V | N | H | G | A | S | Y | R | V | | K | K |
| ABE2.4 | W | R | H | N | P | | R | N | L | S | V | N | H | G | A | S | Y | R | V | | K | K |
| ABE2.5 | W | R | H | N | P | | R | N | L | S | V | N | H | G | A | S | Y | R | V | | K | K |
| ABE2.6 | W | R | H | N | P | | R | N | L | S | V | N | H | G | A | S | Y | R | V | | K | K |
| ABE2.7 | W | R | H | N | P | | R | N | L | S | V | N | H | G | A | S | Y | R | V | | K | K |
| ABE2.8 | W | R | H | N | P | | R | N | L | S | V | N | H | G | A | S | Y | R | V | | K | K |
| ABE2.9 | W | R | H | N | P | | R | N | L | S | V | N | H | G | A | S | Y | R | V | | K | K |
| ABE2.10 | W | R | H | N | P | | R | N | L | S | V | N | H | G | A | S | Y | R | V | | K | K |
| ABE2.11 | W | R | H | N | P | | R | N | L | S | V | N | H | G | A | S | Y | R | V | | K | K |
| ABE2.12 | W | R | H | N | P | | R | N | L | S | V | N | H | G | A | S | Y | R | V | | K | K |
| ABE3.1 | W | R | H | N | P | | R | N | F | S | V | N | Y | G | A | S | Y | R | V | F | K | K |
| ABE3.2 | W | R | H | N | P | | R | N | F | S | V | N | Y | G | A | S | Y | R | V | F | K | K |
| ABE3.3 | W | R | H | N | P | | R | N | F | S | V | N | Y | G | A | S | Y | R | V | F | K | K |
| ABE3.4 | W | R | H | N | P | | R | N | F | S | V | N | Y | G | A | S | Y | R | V | F | K | K |
| ABE3.5 | W | R | H | N | P | | R | N | F | S | V | N | Y | G | A | S | Y | R | V | F | K | K |
| ABE3.6 | W | R | H | N | P | | R | N | F | S | V | N | Y | G | A | S | Y | R | V | F | K | K |
| ABE3.7 | W | R | H | N | P | | R | N | F | S | V | N | Y | G | A | S | Y | R | V | F | K | K |
| ABE3.8 | W | R | H | N | P | | R | N | F | S | V | N | Y | G | A | S | Y | R | V | F | K | K |
| ABE4.1 | W | R | H | N | P | | R | N | L | S | V | N | H | G | N | S | Y | R | V | I | K | K |
| ABE4.2 | W | G | H | N | P | | R | N | L | S | V | N | H | G | N | S | Y | R | V | I | K | K |
| ABE4.3 | W | R | H | N | P | | R | N | F | S | V | N | Y | G | N | S | Y | R | V | F | K | K |
| ABE5.1 | W | R | L | N | P | | L | N | F | S | V | N | Y | G | A | C | Y | R | V | F | N | K |
| ABE5.2 | W | R | H | S | P | | R | N | F | S | V | N | Y | G | A | S | Y | R | V | F | K | T |
| ABE5.3 | W | R | L | N | P | | L | N | I | S | V | N | Y | G | A | C | Y | R | V | F | N | K |
| ABE5.4 | W | R | H | S | P | | R | N | F | S | V | N | Y | G | A | S | Y | R | V | F | K | T |
| ABE5.5 | W | R | L | N | P | | L | N | F | S | V | N | Y | G | A | C | Y | R | V | F | N | K |
| ABE5.6 | W | R | L | N | P | | L | N | F | S | V | N | Y | G | A | C | Y | R | V | F | N | K |
| ABE5.7 | W | R | L | N | P | | L | N | F | S | V | N | Y | G | A | C | Y | R | V | F | N | K |
| ABE5.8 | W | R | L | N | P | | L | N | F | S | V | N | Y | G | A | C | Y | R | V | F | N | K |
| ABE5.9 | W | R | L | N | P | | L | N | F | S | V | N | Y | G | A | C | Y | R | V | F | N | K |
| ABE5.10 | W | R | L | N | P | | L | N | F | S | V | N | Y | G | A | C | Y | R | V | F | N | K |
| ABE5.11 | W | R | L | N | P | | L | N | F | S | V | N | Y | G | A | C | Y | R | V | F | N | K |
| ABE5.12 | W | R | L | N | P | | L | N | F | S | V | N | Y | G | A | C | Y | R | V | F | N | K |
| ABE5.13 | W | R | H | N | P | | L | D | F | S | V | N | Y | A | A | S | Y | R | V | F | K | K |
| ABE5.14 | W | R | H | N | S | | L | N | F | C | V | N | Y | G | A | S | Y | R | V | F | K | K |
| ABE6.1 | W | R | H | N | S | | L | N | F | S | V | N | Y | G | N | S | Y | R | V | F | K | K |
| ABE6.2 | W | R | H | N | T | V | L | N | F | S | V | N | Y | G | N | S | Y | R | V | F | N | K |
| ABE6.3 | W | R | L | N | S | | L | N | F | S | V | N | Y | G | A | C | Y | R | V | F | N | K |
| ABE6.4 | W | R | L | S | S | | L | N | F | S | V | N | Y | G | N | C | Y | R | V | F | N | K |
| ABE6.5 | W | R | L | N | T | V | L | N | F | S | V | N | Y | G | A | C | Y | R | V | F | N | K |
| ABE6.6 | W | R | L | N | T | V | L | N | F | S | V | N | Y | G | N | C | Y | R | V | F | N | K |
| ABE7.1 | W | R | L | N | A | | L | N | F | S | V | N | Y | G | A | C | Y | R | V | F | N | K |
| ABE7.2 | W | R | L | N | A | | L | N | F | S | V | N | Y | G | N | C | Y | R | V | F | N | K |
| ABE7.3 | L | R | L | N | A | | L | N | F | S | V | N | Y | G | A | C | Y | R | V | F | N | K |
| ABE7.4 | R | R | L | N | A | | L | N | F | S | V | N | Y | G | A | C | Y | R | V | F | N | K |
| ABE7.5 | W | R | L | N | A | | L | N | F | S | V | N | Y | G | A | C | Y | H | V | F | N | K |
| ABE7.6 | W | R | L | N | A | | L | N | I | S | V | N | Y | G | A | C | Y | P | V | F | N | K |
| ABE7.7 | L | R | L | N | A | | L | N | F | S | V | N | Y | G | A | C | Y | P | V | F | N | K |
| ABE7.8 | L | R | L | N | A | | L | N | F | S | V | N | Y | G | N | C | Y | R | V | F | N | K |
| ABE7.9 | L | R | L | N | A | | L | N | F | S | V | N | Y | G | N | C | Y | P | V | F | N | K |
| ABE7.10 | R | R | L | N | A | | L | N | F | S | V | N | Y | G | A | C | Y | P | V | F | N | K |

[0537] In some embodiments, the base editor is an eighth generation ABE (ABE8). In some embodiments, the ABE8 contains a TadA*8 variant. In some embodiments, the ABE8 has a monomeric construct containing a TadA*8 variant (“ABE8.x-m”). In some embodiments, the ABE8 is ABE8.1-m, which has a monomeric construct containing TadA*7.10 with a Y147T mutation (TadA*8.1). In some embodiments, the ABE8 is ABE8.2-m, which has a monomeric construct containing TadA*7.10 with a Y147R mutation (TadA*8.2). In some embodiments, the ABE8 is ABE8.3-m, which has a monomeric construct containing TadA*7.10 with a Q154S mutation (TadA*8.3). In some embodiments, the ABE8 is ABE8.4-m, which has a monomeric construct containing TadA*7.10 with a Y123H mutation (TadA*8.4). In some embodiments, the ABE8 is ABE8.5-m, which has a monomeric construct containing TadA*7.10 with a V82S mutation (TadA*8.5). In some embodiments, the ABE8 is ABE8.6-m, which has a monomeric construct containing TadA*7.10 with a T166R mutation (TadA*8.6). In some embodiments, the ABE8 is ABE8.7-m, which has a monomeric construct containing TadA*7.10 with a Q154R mutation (TadA*8.7). In some embodiments, the ABE8 is ABE8.8-m, which has a monomeric construct containing TadA*7.10 with Y147R, Q154R, and Y123H mutations (TadA*8.8). In some embodiments, the ABE8 is ABE8.9-m, which has a monomeric construct containing TadA*7.10 with Y147R, Q154R and I76Y mutations (TadA*8.9). In some embodiments, the ABE8 is ABE8.10-m, which has a monomeric construct containing TadA*7.10 with Y147R, Q154R, and T166R mutations (TadA*8.10). In some embodiments, the ABE8 is ABE8.11-m, which has a monomeric construct containing TadA*7.10 with Y147T and Q154R mutations (TadA*8.11). In some embodiments, the ABE8 is ABE8.12-m, which has a monomeric construct containing TadA*7.10 with Y147T and Q154S mutations (TadA*8.12).

[0538] In some embodiments, the ABE8 is ABE8.13-m, which has a monomeric construct containing TadA*7.10 with Y123H (Y123H reverted from H123Y), Y147R, Q154R and I76Y mutations (TadA*8.13). In some embodiments, the ABE8 is ABE8.14-m, which has a monomeric construct containing TadA*7.10 with I76Y and V82S mutations (TadA*8.14). In some embodiments, the ABE8 is ABE8.15-m, which has a monomeric construct containing TadA*7.10 with V82S and Y147R mutations (TadA*8.15). In some embodiments, the ABE8 is ABE8.16-m, which has a monomeric construct containing TadA*7.10 with V82S, Y123H (Y123H reverted from H123Y) and Y147R mutations (TadA*8.16). In some embodiments, the ABE8 is ABE8.17-m, which has a monomeric construct containing TadA*7.10 with V82S and Q154R mutations (TadA*8.17). In some embodiments, the ABE8 is ABE8.18-m, which has a monomeric construct containing TadA*7.10 with V82S, Y123H (Y123H reverted from H123Y) and Q154R mutations (TadA*8.18). In some embodiments, the ABE8 is ABE8.19-m, which has a monomeric construct containing TadA*7.10 with V82S, Y123H (Y123H reverted from H123Y), Y147R and Q154R mutations (TadA*8.19). In some embodiments, the ABE8 is ABE8.20-m, which has a monomeric construct containing TadA*7.10 with I76Y, V82S, Y123H (Y123H reverted from H123Y), Y147R and Q154R mutations (TadA*8.20). In some embodiments, the ABE8 is ABE8.21-m, which has a monomeric construct containing TadA*7.10 with Y147R and Q154S mutations (TadA*8.21). In some embodiments, the ABE8 is ABE8.22-m, which has a monomeric construct containing TadA*7.10 with V82S and Q154S mutations (TadA*8.22). In some embodiments, the ABE8 is ABE8.23-m, which has a monomeric construct containing TadA*7.10 with V82S and Y123H (Y123H reverted from H123Y) mutations (TadA*8.23). In some embodiments, the ABE8 is ABE8.24-m, which has a monomeric construct containing TadA*7.10 with V82S, Y123H (Y123H reverted from H123Y), and Y147T mutations (TadA*8.24).

[0539] In some embodiments, the ABE8 has a heterodimeric construct containing wild-type E. coli TadA fused to a TadA*8 variant (“ABE8.x-d”). In some embodiments, the ABE8 is ABE8.1-d, which has a heterodimeric construct containing wild-type E. coli TadA fused to TadA*7.10 with a Y147T mutation (TadA*8.1). In some embodiments, the ABE8 is ABE8.2-d, which has a heterodimeric construct containing wild-type E. coli TadA fused to TadA*7.10 with a Y147R mutation (TadA*8.2). In some embodiments, the ABE8 is ABE8.3-d, which has a heterodimeric construct containing wild-type E. coli TadA fused to TadA*7.10 with a Q154S mutation (TadA*8.3). In some embodiments, the ABE8 is ABE8.4-d, which has a heterodimeric construct containing wild-type E. coli TadA fused to TadA*7.10 with a Y123H mutation (TadA*8.4). In some embodiments, the ABE8 is ABE8.5-d, which has a heterodimeric construct containing wild-type E. coli TadA fused to TadA*7.10 with a V82S mutation (TadA*8.5). In some embodiments, the ABE8 is ABE8.6-d, which has a heterodimeric construct containing wild-type E. coli TadA fused to TadA*7.10 with a T166R mutation (TadA*8.6). In some embodiments, the ABE8 is ABE8.7-d, which has a heterodimeric construct containing wild-type E. coli TadA fused to TadA*7.10 with a Q154R mutation (TadA*8.7). In some embodiments, the ABE8 is ABE8.8-d, which has a heterodimeric construct containing wild-type E. coli TadA fused to TadA*7.10 with Y147R, Q154R, and Y123H mutations (TadA*8.8). In some embodiments, the ABE8 is ABE8.9-d, which has a heterodimeric construct containing wild-type E. coli TadA fused to TadA*7.10 with Y147R, Q154R and I76Y mutations (TadA*8.9). In some embodiments, the ABE8 is ABE8.10-d, which has a heterodimeric construct containing wild-type E. coli TadA fused to TadA*7.10 with Y147R, Q154R, and T166R mutations (TadA*8.10). In some embodiments, the ABE8 is ABE8.11-d, which has a heterodimeric construct containing wild-type E. coli TadA fused to TadA*7.10 with Y147T and Q154R mutations (TadA*8.11). In some embodiments, the ABE8 is ABE8.12-d, which has heterodimeric construct containing wild-type E. coli TadA fused to TadA*7.10 with Y147T and Q154S mutations (TadA*8.12). In some embodiments, the ABE8 is ABE8.13-d, which has a heterodimeric construct containing wild-type E. coli TadA fused to TadA*7.10 with Y123H (Y123H reverted from H123Y), Y147R, Q154R and I76Y mutations (TadA*8.13). In some embodiments, the ABE8 is ABE8.14-d, which has a heterodimeric construct containing wild-type E. coli TadA fused to TadA*7.10 with I76Y and V82S mutations (TadA*8.14). In some embodiments, the ABE8 is ABE8.15-d, which has a heterodimeric construct containing wild-type E. coli TadA fused to TadA*7.10 with V82S and Y147R mutations (TadA*8.15). In some embodiments, the ABE8 is ABE8.16-d, which has a heterodimeric construct containing wild-type E. coli TadA fused to TadA*7.10 with V82S, Y123H (Y123H reverted from H123Y) and Y147R mutations (TadA*8.16). In some embodiments, the ABE8 is ABE8.17-d, which has a heterodimeric construct containing wild-type E. coli TadA fused to TadA*7.10 with V82S and Q154R mutations (TadA*8.17). In some embodiments, the ABE8 is ABE8.18-d, which has a heterodimeric construct containing wild-type E. coli TadA fused to TadA*7.10 with V82S, Y123H (Y123H reverted from H123Y) and Q154R mutations (TadA*8.18). In some embodiments, the ABE8 is ABE8.19-d, which has a heterodimeric construct containing wild-type E. coli TadA fused to TadA*7.10 with V82S, Y123H (Y123H reverted from H123Y), Y147R and Q154R mutations (TadA*8.19). In some embodiments, the ABE8 is ABE8.20-d, which has a heterodimeric construct containing wild-type E. coli TadA fused to TadA*7.10 with I76Y, V82S, Y123H (Y123H reverted from H123Y), Y147R and Q154R mutations (TadA*8.20). In some embodiments, the ABE8 is ABE8.21-d, which has a heterodimeric construct containing wild-type E. coli TadA fused to TadA*7.10 with Y147R and Q154S mutations (TadA*8.21). In some embodiments, the ABE8 is ABE8.22-d, which has a heterodimeric construct containing wild-type E. coli TadA fused to TadA*7.10 with V82S and Q154S mutations (TadA*8.22). In some embodiments, the ABE8 is ABE8.23-d, which has a heterodimeric construct containing wild-type E. coli TadA fused to TadA*7.10 with V82S and Y123H (Y123H reverted from H123Y) mutations (TadA*8.23). In some embodiments, the ABE8 is ABE8.24-d, which has a heterodimeric construct containing wild-type E. coli TadA fused to TadA*7.10 with V82S, Y123H (Y123H reverted from H123Y), and Y147T mutations (TadA*8.24).

[0540] In some embodiments, the ABE8 has a heterodimeric construct containing TadA*7.10 fused to a TadA*8 variant (“ABE8.x-7”). In some embodiments, the ABE8 is ABE8.1-7, which has a heterodimeric construct containing TadA*7.10 fused to TadA*7.10 with a Y147T mutation (TadA*8.1). In some embodiments, the ABE8 is ABE8.2-7, which has a heterodimeric construct containing TadA*7.10 fused to TadA*7.10 with a Y147R mutation (TadA*8.2). In some embodiments, the ABE8 is ABE8.3-7, which has a heterodimeric construct containing TadA*7.10 fused to TadA*7.10 with a Q154S mutation (TadA*8.3). In some embodiments, the ABE8 is ABE8.4-7, which has a heterodimeric construct containing TadA*7.10 fused to TadA*7.10 with a Y123H mutation (TadA*8.4). In some embodiments, the ABE8 is ABE8.5-7, which has a heterodimeric construct containing TadA*7.10 fused to TadA*7.10 with a V82S mutation (TadA*8.5). In some embodiments, the ABE8 is ABE8.6-7, which has a heterodimeric construct containing TadA*7.10 fused to TadA*7.10 with a T166R mutation (TadA*8.6). In some embodiments, the ABE8 is ABE8.7-7, which has a heterodimeric construct containing TadA*7.10 fused to TadA*7.10 with a Q154R mutation (TadA*8.7). In some embodiments, the ABE8 is ABE8.8-7, which has a heterodimeric construct containing TadA*7.10 fused to TadA*7.10 with Y147R, Q154R, and Y123H mutations (TadA*8.8). In some embodiments, the ABE8 is ABE8.9-7, which has a heterodimeric construct containing TadA*7.10 fused to TadA*7.10 with Y147R, Q154R and I76Y mutations (TadA*8.9). In some embodiments, the ABE8 is ABE8.10-7, which has a heterodimeric construct containing TadA*7.10 fused to TadA*7.10 with Y147R, Q154R, and T166R mutations (TadA*8.10). In some embodiments, the ABE8 is ABE8.11-7, which has a heterodimeric construct containing TadA*7.10 fused to TadA*7.10 with Y147T and Q154R mutations (TadA*8.11). In some embodiments, the ABE8 is ABE8.12-7, which has a heterodimeric construct containing TadA*7.10 fused to TadA*7.10 with Y147T and Q154S mutations (TadA*8.12). In some embodiments, the ABE8 is ABE8.13-7, which has a heterodimeric construct containing TadA*7.10 fused to TadA*7.10 with Y123H (Y123H reverted from H123Y), Y147R, Q154R and I76Y mutations (TadA*8.13). In some embodiments, the ABE8 is ABE8.14-7, which has a heterodimeric construct containing TadA*7.10 fused to TadA*7.10 with I76Y and V82S mutations (TadA*8.14). In some embodiments, the ABE8 is ABE8.15-7, which has a heterodimeric construct containing TadA*7.10 fused to TadA*7.10 with V82S and Y147R mutations (TadA*8.15). In some embodiments, the ABE8 is ABE8.16-7, which has a heterodimeric construct containing TadA*7.10 fused to TadA*7.10 with V82S, Y123H (Y123H reverted from H123Y) and Y147R mutations (TadA*8.16). In some embodiments, the ABE8 is ABE8.17-7, which has a heterodimeric construct containing TadA*7.10 fused to TadA*7.10 with V82S and Q154R mutations (TadA*8.17). In some embodiments, the ABE8 is ABE8.18-7, which has a heterodimeric construct containing TadA*7.10 fused to TadA*7.10 with V82S, Y123H (Y123H reverted from H123Y) and Q154R mutations (TadA*8.18). In some embodiments, the ABE8 is ABE8.19-7, which has a heterodimeric construct containing TadA*7.10 fused to TadA*7.10 with V82S, Y123H (Y123H reverted from H123Y), Y147R and Q154R mutations (TadA*8.19). In some embodiments, the ABE8 is ABE8.20-7, which has a heterodimeric construct containing TadA*7.10 fused to TadA*7.10 with I76Y, V82S, Y123H (Y123H reverted from H123Y), Y147R and Q154R mutations (TadA*8.20). In some embodiments, the ABE8 is ABE8.21-7, which has a heterodimeric construct containing TadA*7.10 fused to TadA*7.10 with Y147R and Q154S mutations (TadA*8.21). In some embodiments, the ABE8 is ABE8.22-7, which has a heterodimeric construct containing TadA*7.10 fused to TadA*7.10 with V82S and Q154S mutations (TadA*8.22). In some embodiments, the ABE8 is ABE8.23-7, which has a heterodimeric construct containing TadA*7.10 fused to TadA*7.10 with V82S and Y123H (Y123H reverted from H123Y) mutations (TadA*8.23). In some embodiments, the ABE8 is ABE8.24-7, which has a heterodimeric construct containing TadA*7.10 fused to TadA*7.10 with V82S, Y123H (Y123H reverted from H123Y), and Y147T mutations (TadA*8.24).

[0541] In some embodiments, the ABE is ABE8.1-m, ABE8.2-m, ABE8.3-m, ABE8.4-m, ABE8.5-m, ABE8.6-m, ABE8.7-m, ABE8.8-m, ABE8.9-m, ABE8.10-m, ABE8.11-m, ABE8.12-m, ABE8.13-m, ABE8.14-m, ABE8.15-m, ABE8.16-m, ABE8.17-m, ABE8.18-m, ABE8.19-m, ABE8.20-m, ABE8.21-m, ABE8.22-m, ABE8.23-m, ABE8.24-m, ABE8.1-d, ABE8.2-d, ABE8.3-d, ABE8.4-d, ABE8.5-d, ABE8.6-d, ABE8.7-d, ABE8.8-d, ABE8.9-d, ABE8.10-d, ABE8.11-d ABE8.12-d, ABE8.13-d, ABE8.14-d, ABE8.15-d, ABE8.16-d, ABE8.17-d, ABE8.18-d, ABE8.19-d, ABE8.20-d, ABE8.21-d, ABE8.22-d, ABE8.23-d, or ABE8.24-d as shown in Table 11 below.

TABLE 11
Adenosine Deaminase Base Editor 8 (ABE8) Variants

| | Adenosine | |
|---|---|---|
| ABE8 | Deaminase | Adenosine Deaminase Description |
| ABE8.1-m | TadA*8.1 | Monomer_TadA*7.10 + Y147T |
| ABE8.2-m | TadA*8.2 | Monomer_TadA*7.10 + Y147R |
| ABE8.3-m | TadA*8.3 | Monomer_TadA*7.10 + Q154S |
| ABE8.4-m | TadA*8.4 | Monomer_TadA*7.10 + Y123H |
| ABE8.5-m | TadA*8.5 | Monomer_TadA*7.10 + V82S |
| ABE8.6-m | TadA*8.6 | Monomer_TadA*7.10 + T166R |
| ABE8.7-m | TadA*8.7 | Monomer_TadA*7.10 + Q154R |
| ABE8.8-m | TadA*8.8 | Monomer_TadA*7.10 + Y147R_Q154R_Y123H |
| ABE8.9-m | TadA*8.9 | Monomer_TadA*7.10 + Y147R_Q154R_I76Y |
| ABE8.10-m | TadA*8.10 | Monomer_TadA*7.10 + Y147R_Q154R_T166R |
| ABE8.11-m | TadA*8.11 | Monomer_TadA*7.10 + Y147T_Q154R |
| ABE8.12-m | TadA*8.12 | Monomer_TadA*7.10 + Y147T_Q154S |
| ABE8.13-m | TadA*8.13 | Monomer_TadA*7.10 + Y123H_Y147R_Q154R_I76Y |
| ABE8.14-m | TadA*8.14 | Monomer_TadA*7.10 + I76Y_V82S |
| ABE8.15-m | TadA*8.15 | Monomer_TadA*7.10 + V82S_Y147R |
| ABE8.16-m | TadA*8.16 | Monomer_TadA*7.10 + V82S_Y123H_Y147R |
| ABE8.17-m | TadA*8.17 | Monomer_TadA*7.10 + V82S_Q154R |
| ABE8.18-m | TadA*8.18 | Monomer_TadA*7.10 + V82S_Y123H_Q154R |
| ABE8.19-m | TadA*8.19 | Monomer_TadA*7.10 + V82S_Y123H_Y147R_Q154R |
| ABE8.20-m | TadA*8.20 | Monomer_TadA*7.10 + I76Y_V82S_Y123H_Y147R_Q154R |
| ABE8.21-m | TadA*8.21 | Monomer_TadA*7.10 + Y147R_Q154S |
| ABE8.22-m | TadA*8.22 | Monomer_TadA*7.10 + V82S_Q154S |
| ABE8.23-m | TadA*8.23 | Monomer_TadA*7.10 + V82S_Y123H |
| ABE8.24-m | TadA*8.24 | Monomer_TadA*7.10 + V82S_Y123H_Y147T |
| ABE8.1-d | TadA*8.1 | Heterodimer_(WT) + (TadA*7.10 + Y147T) |
| ABE8.2-d | TadA*8.2 | Heterodimer_(WT) + (TadA*7.10 + Y147R) |
| ABE8.3-d | TadA*8.3 | Heterodimer_(WT) + (TadA*7.10 + Q154S) |
| ABE8.4-d | TadA*8.4 | Heterodimer_(WT) + (TadA*7.10 + Y123H) |
| ABE8.5-d | TadA*8.5 | Heterodimer_(WT) + (TadA*7.10 + V82S) |
| ABE8.6-d | TadA*8.6 | Heterodimer_(WT) + (TadA*7.10 + T166R) |
| ABE8.7-d | TadA*8.7 | Heterodimer_(WT) + (TadA*7.10 + Q154R) |
| ABE8.8-d | TadA*8.8 | Heterodimer_(WT) + (TadA*7.10 + Y147R_Q154R_Y123H) |
| ABE8.9-d | TadA*8.9 | Heterodimer_(WT) + (TadA*7.10 + Y147R_Q154R_I76Y) |
| ABE8.10-d | TadA*8.10 | Heterodimer_(WT) + (TadA*7.10 + Y147R_Q154R_T166R) |
| ABE8.11-d | TadA*8.11 | Heterodimer_(WT) + (TadA*7.10 + Y147T_Q154R) |
| ABE8.12-d | TadA*8.12 | Heterodimer_(WT) + (TadA*7.10 + Y147T_Q154S) |
| ABE8.13-d | TadA*8.13 | Heterodimer_(WT) + (TadA*7.10 + Y123H_Y147T_Q154R_I76Y) |
| ABE8.14-d | TadA*8.14 | Heterodimer_(WT) + (TadA*7.10 + I76Y_V82S) |
| ABE8.15-d | TadA*8.15 | Heterodimer_(WT) + (TadA*7.10 + V82S_Y147R) |
| ABE8.16-d | TadA*8.16 | Heterodimer_(WT) + (TadA*7.10 + V82S_Y123H_Y147R) |
| ABE8.17-d | TadA*8.17 | Heterodimer_(WT) + (TadA*7.10 + V82S_Q154R) |
| ABE8.18-d | TadA*8.18 | Heterodimer_(WT) + (TadA*7.10 + V82S_Y123H_Q154R) |
| ABE8.19-d | TadA*8.19 | Heterodimer_(WT) + (TadA*7.10 + V82S_Y123H_Y147R_Q154R) |
| ABE8.20-d | TadA*8.20 | Heterodimer_(WT) + (TadA*7.10 + I76Y_V82S_Y123H_Y147R_Q154R) |
| ABE8.21-d | TadA*8.21 | Heterodimer_(WT) + (TadA*7.10 + Y147R_Q154S) |
| ABE8.22-d | TadA*8.22 | Heterodimer_(WT) + (TadA*7.10 + V82S_Q154S) |
| ABE8.23-d | TadA*8.23 | Heterodimer_(WT) + (TadA*7.10 + V82S_Y123H) |
| ABE8.24-d | TadA*8.24 | Heterodimer_(WT) + (TadA*7.10 + V82S_Y123H_Y147T) |

[0542] In some embodiments, the ABE8 is ABE8a-m, which has a monomeric construct containing TadA*7.10 with R26C, A109S, T111R, D119N, H122N, Y147D, F149Y, T166I, and D167N mutations (TadA*8a). In some embodiments, the ABE8 is ABE8b-m, which has a monomeric construct containing TadA*7.10 with V88A, A109S, T111R, D119N, H122N, F149Y, T166I, and D167N mutations (TadA*8b). In some embodiments, the ABE8 is ABE8c-m, which has a monomeric construct containing TadA*7.10 with R26C, A109S, T111R, D119N, H122N, F149Y, T166I, and D167N mutations (TadA*8c). In some embodiments, the ABE8 is ABE8d-m, which has a monomeric construct containing TadA*7.10 with V88A, T111R, D119N, and F149Y mutations (TadA*8d). In some embodiments, the ABE8 is ABE8e-m, which has a monomeric construct containing TadA*7.10 with A109S, T111R, D119N, H122N, Y147D, F149Y, T166I, and D167N mutations (TadA*8e).

[0543] In some embodiments, the ABE8 is ABE8a-d, which has a heterodimeric construct containing wild-type E. coli TadA fused to TadA*7.10 with R26C, A109S, T111R, D119, H122N, Y147D, F149Y, T166I, and D167N mutations (TadA*8a). In some embodiments, the ABE8 is ABE8b-d, which has a heterodimeric construct containing wild-type E. coli TadA fused to TadA*7.10 with V88A, A109S, T111R, D119N, H122N, F149Y, T166I, and D167N mutations (TadA*8b). In some embodiments, the ABE8 is ABE8c-d, which has a heterodimeric construct containing wild-type E. coli TadA fused to TadA*7.10 with R26C, A109S, T111R, D119N, H122N, F149Y, T166I, and D167N mutations (TadA*8c). In some embodiments, the ABE8 is ABE8d-d, which has a heterodimeric construct containing wild-type E. coli TadA fused to TadA*7.10 with V88A, T111R, D119N, and F149Y mutations (TadA*8d). In some embodiments, the ABE8 is ABE8e-d, which has a heterodimeric construct containing wild-type E. coli TadA fused to TadA*7.10 with A109S, T111R, D119N, H122N, Y147D, F149Y, T166I, and D167N mutations (TadA*8e).

[0544] In some embodiments, the ABE8 is ABE8a-7, which has a heterodimeric construct containing TadA*7.10 fused to TadA*7.10 with R26C, A109S, T111R, D119, H122N, Y147D, F149Y, T166I, and D167N mutations (TadA*8a). In some embodiments, the ABE8 is ABE8b-7, which has a heterodimeric construct containing TadA*7.10 fused to TadA*7.10 with V88A, A109S, T111R, D119N, H122N, F149Y, T166I, and D167N mutations (TadA*8b). In some embodiments, the ABE8 is ABE8c-7, which has a heterodimeric construct containing TadA*7.10 fused to TadA*7.10 with R26C, A109S, T111R, D119N, H122N, F149Y, T166I, and D167N mutations (TadA*8c). In some embodiments, the ABE8 is ABE8d-7, which has a heterodimeric construct containing TadA*7.10 fused to TadA*7.10 with V88A, T111R, D119N, and F149Y mutations (TadA*8d). In some embodiments, the ABE8 is ABE8e-7, which has a heterodimeric construct containing TadA*7.10 fused to TadA*7.10 with A109S, T111R, D119N, H122N, Y147D, F149Y, T166I, and D167N mutations (TadA*8e).

In some embodiments, the ABE is ABE8a-m, ABE8b-m, ABE8c-m, ABE8d-m, ABE8e-m, ABE8a-d, ABE8b-d, ABE8c-d, ABE8d-d, or ABE8e-d, as shown in Table 12 below. In some embodiments, the ABE is ABE8e-m or ABE8e-d. ABE8e shows efficient adenine base editing activity and low indel formation when used with Cas homologues other than SpCas9, for example, SaCas9, SaCas9-KKH, Cas12a homologues, e.g., LbCas12a, enAs-Cas12a, SpCas9-NG and circularly permuted CP1028-SpCas9 and CP1041-SpCas9. In addition to the mutations shown for ABE8e in Table 12, off-target RNA and DNA editing were reduced by introducing a V106W substitution into the TadA domain (as described in M. Richter et al., 2020, Nature Biotechnology, doi.org/10.1038/s41587-020-0453-z, the entire contents of which are incorporated by reference herein).

TABLE 12
Additional Adenosine Deaminase Base Editor 8 Variants. In the table, “monomer”
indicates an ABE comprising a single TadA*7.10 comprising the indicated alterations
and “heterodimer” indicates an ABE comprising a TadA*7.10 comprising the
indicated alterations fused to an E. coli TadA adenosine deaminase.

| ABE8 Base | Adenosine | |
|---|---|---|
| Editor | Deaminase | Adenosine Deaminase Description |
| ABE8a-m | TadA*8a | Monomer_TadA*7.10 + R26C + A109S + T111R + D119N + |
| | | H122N + Y147D + F149Y + T166I + D167N |
| ABE8b-m | TadA*8b | Monomer_TadA*7.10 + V88A + A109S + T111R + D119N + |
| | | H122N + F149Y + T166I + D167N |
| ABE8c-m | TadA*8c | Monomer_TadA*7.10 + R26C + A109S + T111R + D119N + |
| | | H122N + F149Y + T166I + D167N |
| ABE8d-m | TadA*8d | Monomer_TadA*7.10 + V88A + T111R + D119N + F149Y |
| ABE8e-m | TadA*8e | Monomer_TadA*7.10 + A109S + T111R + D119N + H122N + |
| | | Y147D + F149Y + T166I + D167N |
| ABE8a-d | TadA*8a | Heterodimer_(WT) + (TadA*7.10 + R26C + A109S + T111R + |
| | | D119N + H122N + Y147D + F149Y + T166I + D167N) |
| ABE8b-d | TadA*8b | Heterodimer_(WT) + (TadA*7.10 + V88A + A109S + T111R + |
| | | D119N + H122N + F149Y + T166I + D167N) |
| ABE8c-d | TadA*8c | Heterodimer_(WT) + (TadA*7.10 + R26C + A109S + T111R + |
| | | D119N + H122N + F149Y + T166I + D167N) |
| ABE8d-d | TadA*8d | Heterodimer_(WT) + (TadA*7.10 + V88A + T111R + D119N + |
| | | F149Y) |
| ABE8e-d | TadA*8e | Heterodimer_(WT) + (TadA*7.10 + A109S + T111R + D119N + |
| | | H122N + Y147D + F149Y + T166I + D167N) |

[0545] In some embodiments, base editors (e.g., ABE8) are generated by cloning an adenosine deaminase variant (e.g., TadA*8) into a scaffold that includes a circular permutant Cas9 (e.g., CP5 or CP6) and a bipartite nuclear localization sequence. In some embodiments, the base editor (e.g., ABE7.9, ABE7.10, or ABE8) is an NGC PAM CP5 variant (S. pyogenes Cas9 or spVRQR Cas9). In some embodiments, the base editor (e.g., ABE7.9, ABE7.10, or ABE8) is an AGA PAM CP5 variant (S. pyogenes Cas9 or spVRQR Cas9). In some embodiments, the base editor (e.g., ABE7.9, ABE7.10, or ABE8) is an NGC PAM CP6 variant (S. pyogenes Cas9 or spVRQR Cas9). In some embodiments, the base editor (e.g. ABE7.9, ABE7.10, or ABE8) is an AGA PAM CP6 variant (S. pyogenes Cas9 or spVRQR Cas9).

[0546] In some embodiments, the ABE has a genotype as shown in Table 13 below.

TABLE 13
Genotypes of ABEs

| | 23 | 26 | 36 | 37 | 48 | 49 | 51 | 72 | 84 | 87 | 105 | 108 | 123 | 125 | 142 | 145 | 147 | 152 | 155 | 156 | 157 | 161 |
|---|---|---|---|---|---|---|---|---|---|---|---|---|---|---|---|---|---|---|---|---|---|---|
| ABE7.9 | L | R | L | N | A | | L | N | F | S | V | N | Y | G | N | C | Y | P | V | F | N | K |
| ABE7.10 | R | R | L | N | A | | L | N | F | S | V | N | Y | G | A | C | Y | P | V | F | N | K |

As shown in Table 14 below, genotypes of 40 ABE8s are described. Residue positions in the evolved E. coli TadA portion of ABE are indicated. Mutational changes in ABE8 are shown when distinct from ABE7.10 mutations. In some embodiments, the ABE has a genotype of one of the ABEs as shown in Table 14 below.

TABLE 14
Residue Identity in Evolved TadA

| | 23 | 36 | 48 | 51 | 76 | 82 | 84 | 106 | 108 | 123 | 146 | 147 | 152 | 154 | 155 | 156 | 157 | 166 |
|---|---|---|---|---|---|---|---|---|---|---|---|---|---|---|---|---|---|---|
| ABE7.10 | R | L | A | L | I | V | F | V | N | Y | C | Y | P | Q | V | F | N | T |
| ABE8.1-m | | | | | | | | | | | | T | | | | | | |
| ABE8.2-m | | | | | | | | | | | | R | | | | | | |
| ABE8.3-m | | | | | | | | | | | | | | S | | | | |
| ABE8.4-m | | | | | | | | | | H | | | | | | | | |
| ABE8.5-m | | | | | | S | | | | | | | | | | | | |
| ABE8.6-m | | | | | | | | | | | | | | | | | | R |
| ABE8.7-m | | | | | | | | | | | | | | R | | | | |
| ABE8.8-m | | | | | | | | | | H | | R | | R | | | | |
| ABE8.9-m | | | | | Y | | | | | | | R | | R | | | | |
| ABE8.10- | | | | | | | | | | | | R | | R | | | | R |
| m | | | | | | | | | | | | | | | | | | |
| ABE8.11- | | | | | | | | | | | | T | | R | | | | |
| m | | | | | | | | | | | | | | | | | | |
| ABE8.12- | | | | | | | | | | | | T | | S | | | | |
| m | | | | | | | | | | | | | | | | | | |
| ABE8.13- | | | | | Y | | | | | H | | R | | R | | | | |
| m | | | | | | | | | | | | | | | | | | |
| ABE8.14- | | | | | Y | S | | | | | | | | | | | | |
| m | | | | | | | | | | | | | | | | | | |
| ABE8.15- | | | | | | S | | | | | | R | | | | | | |
| m | | | | | | | | | | | | | | | | | | |
| ABE8.16- | | | | | | S | | | | H | | R | | | | | | |
| m | | | | | | | | | | | | | | | | | | |
| ABE8.17- | | | | | | S | | | | | | | | R | | | | |
| m | | | | | | | | | | | | | | | | | | |
| ABE8.18- | | | | | | S | | | | H | | | | R | | | | |
| m | | | | | | | | | | | | | | | | | | |
| ABE8.19- | | | | | | S | | | | H | | R | | R | | | | |
| m | | | | | | | | | | | | | | | | | | |
| ABE8.20- | | | | | Y | S | | | | H | | R | | R | | | | |
| m | | | | | | | | | | | | | | | | | | |
| ABE8.21- | | | | | | | | | | | | R | | S | | | | |
| m | | | | | | | | | | | | | | | | | | |
| ABE8.22- | | | | | | S | | | | | | | | S | | | | |
| m | | | | | | | | | | | | | | | | | | |
| ABE8.23- | | | | | | S | | | | H | | | | | | | | |
| m | | | | | | | | | | | | | | | | | | |
| ABE8.24- | | | | | | S | | | | H | | T | | | | | | |
| m | | | | | | | | | | | | | | | | | | |
| ABE8.1-d | | | | | | | | | | | | T | | | | | | |
| ABE8.2-d | | | | | | | | | | | | R | | | | | | |
| ABE8.3-d | | | | | | | | | | | | | | S | | | | |
| ABE8.4-d | | | | | | | | | | H | | | | | | | | |
| ABE8.5-d | | | | | | S | | | | | | | | | | | | |
| ABE8.6-d | | | | | | | | | | | | | | | | | | R |
| ABE8.7-d | | | | | | | | | | | | | | R | | | | |
| ABE8.8-d | | | | | | | | | | H | | R | | R | | | | |
| ABE8.9-d | | | | | Y | | | | | | | R | | R | | | | |
| ABE8.10- | | | | | | | | | | | | R | | R | | | | R |
| d | | | | | | | | | | | | | | | | | | |
| ABE8.11- | | | | | | | | | | | | T | | R | | | | |
| d | | | | | | | | | | | | | | | | | | |
| ABE8.12- | | | | | | | | | | | | T | | S | | | | |
| d | | | | | | | | | | | | | | | | | | |
| ABE8.13- | | | | | Y | | | | | H | | R | | R | | | | |
| d | | | | | | | | | | | | | | | | | | |
| ABE8.14- | | | | | Y | S | | | | | | | | | | | | |
| d | | | | | | | | | | | | | | | | | | |
| ABE8.15- | | | | | | S | | | | | | R | | | | | | |
| d | | | | | | | | | | | | | | | | | | |
| ABE8.16- | | | | | | S | | | | H | | R | | | | | | |
| d | | | | | | | | | | | | | | | | | | |
| ABE8.17- | | | | | | S | | | | | | | | R | | | | |
| d | | | | | | | | | | | | | | | | | | |
| ABE8.18- | | | | | | S | | | | H | | | | R | | | | |
| d | | | | | | | | | | | | | | | | | | |
| ABE8.19- | | | | | | S | | | | H | | R | | R | | | | |
| d | | | | | | | | | | | | | | | | | | |
| ABE8.20- | | | | | Y | S | | | | H | | R | | R | | | | |
| d | | | | | | | | | | | | | | | | | | |
| ABE8.21- | | | | | | | | | | | | R | | S | | | | |
| d | | | | | | | | | | | | | | | | | | |
| ABE8.22- | | | | | | S | | | | | | | | S | | | | |
| d | | | | | | | | | | | | | | | | | | |
| ABE8.23- | | | | | | S | | | | H | | | | | | | | |
| d | | | | | | | | | | | | | | | | | | |
| ABE8.24- | | | | | | S | | | | H | | T | | | | | | |
| d | | | | | | | | | | | | | | | | | | |

[0547] In some embodiments, the base editor is ABE8.1, which comprises or consists essentially of the following sequence or a fragment thereof having adenosine deaminase activity:

ABE8.1_Y147T_CP5_NGC PAM_monomer
(SEQ ID NO: 1426)
MSEVEFSHEYWMRHALTLAKRARDEREVPVGAVLVLNNRVIGEGWNRAIGLHDPTAHAEI
MALRQGGLVMQNYRLIDATLYVTFEPCVMCAGAMIHSRIGRVVFGVRNAKTGAAGSLMDV
LHYPGMNHRVEITEGILADECAALLCTFFRMPRQVFNAQKKAQSSTD [symbol] [symbol]
EIGKATAKYFFYSNIMNFFKTEITLANGEIRKRPLIETNGETG
EIVWDKGRDFATVRKVLSMPQVNIVKKTEVQTGGFSKESILPKRNSDKLIARKKDWDPKK
YGGFMQPTVAYSVLVVAKVEKGKSKKLKSVKELLGITIMERSSFEKNPIDFLEAKGYKEVK
KDLIIKLPKYSLFELENGRKRMLASAKFLQKGNELALPSKYVNFLYLASHYEKLKGSPEDN
EQKQLFVEQHKHYLDEIIEQISEFSKRVILADANLDKVLSAYNKHRDKPIREQAENIIHLFTL
TNLGAPRAFKYFDTTIARKEYRSTKEVLDATLIHQSITGLYETRIDLSQLGGD [symbol] [symbol]
DKKYSIGLAIGTNSVGWAVITDEYKVPSKKFKVLGNTDRHSIKKNLI
GALLFDSGETAEATRLKRTARRRYTRRKNRICYLQEIFSNEMAKVDDSFFHRLEESFLVEE
DKKHERHPIFGNIVDEVAYHEKYPTIYHLRKKLVDSTDKADLRLIYLALAHMIKFRGHFLIEG
DLNPDNSDVDKLFIQLVQTYNQLFEENPINASGVDAKAILSARLSKSRRLENLIAQLPGEK
KNGLFGNLIALSLGLTPNFKSNFDLAEDAKLQLSKDTYDDDLDNLLAQIGDQYADLFLAA
KNLSDAILLSDILRVNTEITKAPLSASMIKRYDEHHQDLTLLKALVRQQLPEKYKEIFFDQS
KNGYAGYIDGGASQEEFYKFIKPILEKMDGTEELLVKLNREDLLRKQRTFDNGSIPHQIHL
GELHAILRRQEDFYPFLKDNREKIEKILTFRIPYYVGPLARGNSRFAWMTRKSEETITPWNF
EEVVDKGASAQSFIERMTNFDKNLPNEKVLPKHSLLYEYFTVYNELTKVKYVTEGMRKPA
FLSGEQKKAIVDLLFKTNRKVTVKQLKEDYFKKIECFDSVEISGVEDRFNASLGTYHDLLKII
KDKDFLDNEENEDILEDIVLTLTLFEDREMIEERLKTYAHLFDDKVMKQLKRRRYTGWGRL
SRKLINGIRDKQSGKTILDFLKSDGFANRNFMQLIHDDSLTFKEDIQKAQVSGQGDSLHEHI
ANLAGSPAIKKGILQTVKVVDELVKVMGRHKPENIVIEMARENQTTQKGQKNSRERMKRI
EEGIKELGSQILKEHPVENTQLQNEKLYLYYLQNGRDMYVDQELDINRLSDYDVDHIVPQS
FLKDDSIDNKVLTRSDKNRGKSDNVPSEEWKKMKNYWRQLLNAKLITQRKFDNLTKAER
GGLSELDKAGFIKRQLVETRQITKHVAQILDSRMNTKYDENDKLIREVKVITLKSKLVSDFR
KDFQFYKVREINNYHHAHDAYLNAVVGTALIKKYPKLESEFVYGDYKVYDVRKMIAKSEQ
EGADKRTADGSEFESPKKKRKV

[0548] In the above sequence, the plain text denotes an adenosine deaminase sequence, bold sequence indicates sequence derived from Cas9, the italicized sequence denotes a linker sequence, and the underlined sequence denotes a bipartite nuclear localization sequence. Other ABE8 sequences are provided in the attached sequence listing (SEQ ID NOs: 1427-1449).

[0549] In some embodiments, the base editor is a ninth generation ABE (ABE9). In some embodiments, the ABE9 contains a TadA*9 variant. ABE9 base editors include an adenosine deaminase variant comprising an amino acid sequence, which contains alterations relative to an ABE 7*10 reference sequence, as described herein. Exemplary ABE9 variants are listed in Table 15. Details of ABE9 base editors are described in International PCT Application No. PCT/2020/049975, which is incorporated herein by reference for its entirety.

TABLE 15
Adenosine Deaminase Base Editor 9 (ABE9) Variants. In the table,
“monomer” indicates an ABE comprising a single TadA*7.10
comprising the indicated alterations and “heterodimer”
indicates an ABE comprising a TadA*7.10 comprising the indicated
alterations fused to an E. coli TadA adenosine deaminase.

| ABE9 Description | Alterations |
|---|---|
| ABE9.1_monomer | E25F, V82S, Y123H, T133K, Y147R, Q154R |
| ABE9.2_monomer | E25F, V82S, Y123H, Y147R, Q154R |
| ABE9.3_monomer | V82S, Y123H, P124W, Y147R, Q154R |
| ABE9.4_monomer | L51W, V82S, Y123H, C146R, Y147R, Q154R |
| ABE9.5_monomer | P54C, V82S, Y123H, Y147R, Q154R |
| ABE9.6_monomer | Y73S, V82S, Y123H, Y147R, Q154R |
| ABE9.7_monomer | N38G, V82T, Y123H, Y147R, Q154R |
| ABE9.8_monomer | R23H, V82S, Y123H, Y147R, Q154R |
| ABE9.9_monomer | R21N, V82S, Y123H, Y147R, Q154R |
| ABE9.10_monomer | V82S, Y123H, Y147R, Q154R, A158K |
| ABE9.11_monomer | N72K, V82S, Y123H, D139L, Y147R, Q154R, |
| ABE9.12_monomer | E25F, V82S, Y123H, D139M, Y147R, Q154R |
| ABE9.13_monomer | M70V, V82S, M94V, Y123H, Y147R, Q154R |
| ABE9.14_monomer | Q71M, V82S, Y123H, Y147R, Q154R |
| ABE9.15_heterodimer | E25F, V82S, Y123H, T133K, Y147R, Q154R |
| ABE9.16_heterodimer | E25F, V82S, Y123H, Y147R, Q154R |
| ABE9.17_heterodimer | V82S, Y123H, P124W, Y147R, Q154R |
| ABE9.18_heterodimer | L51W, V82S, Y123H, C146R, Y147R, Q154R |
| ABE9.19_heterodimer | P54C, V82S, Y123H, Y147R, Q154R |
| ABE9.2_heterodimer | Y73S, V82S, Y123H, Y147R, Q154R |
| ABE9.21_heterodimer | N38G, V82T, Y123H, Y147R, Q154R |
| ABE9.22_heterodimer | R23H, V82S, Y123H, Y147R, Q154R |
| ABE9.23_heterodimer | R21N, V82S, Y123H, Y147R, Q154R |
| ABE9.24_heterodimer | V82S, Y123H, Y147R, Q154R, A158K |
| ABE9.25_heterodimer | N72K, V82S, Y123H, D139L, Y147R, Q154R, |
| ABE9.26_heterodimer | E25F, V82S, Y123H, D139M, Y147R, Q154R |
| ABE9.27_heterodimer | M70V, V82S, M94V, Y123H, Y147R, Q154R |
| ABE9.28_heterodimer | Q71M, V82S, Y123H, Y147R, Q154R |
| ABE9.29_monomer | E25F_I76Y_V82S_Y123H_Y147R_Q154R |
| ABE9.30_monomer | I76Y_V82T_Y123H_Y147R_Q154R |
| ABE9.31_monomer | N38G_I76Y_V82S_Y123H_Y147R_Q154R |
| ABE9.32_monomer | N38G_I76Y_V82T_Y123H_Y147R_Q154R |
| ABE9.33_monomer | R23H_I76Y_V82S_Y123H_Y147R_Q154R |
| ABE9.34_monomer | P54C_I76Y_V82S_Y123H_Y147R_Q154R |
| ABE9.35_monomer | R21N_I76Y_V82S_Y123H_Y147R_Q154R |
| ABE9.36_monomer | I76Y_V82S_Y123H_D138M_Y147R_Q154R |
| ABE9.37_monomer | Y72S_I76Y_V82S_Y123H_Y147R_Q154R |
| ABE9.38_heterodimer | E25F_I76Y_V82S_Y123H_Y147R_Q154R |
| ABE9.39_heterodimer | I76Y_V82T_Y123H_Y147R_Q154R |
| ABE9.40_heterodimer | N38G_I76Y_V82S_Y123H_Y147R_Q154R |
| ABE9.41_heterodimer | N38G_I76Y_V82T_Y123H_Y147R_Q154R |
| ABE9.42_heterodimer | R23H_I76Y_V82S_Y123H_Y147R_Q154R |
| ABE9.43_heterodimer | P54C_I76Y_V82S_Y123H_Y147R_Q154R |
| ABE9.44_heterodimer | R21N_I76Y_V82S_Y123H_Y147R_Q154R |
| ABE9.45_heterodimer | I76Y_V82S_Y123H_D138M_Y147R_Q154R |
| ABE9.46_heterodimer | Y72S_I76Y_V82S_Y123H_Y147R_Q154R |
| ABE9.47_monomer | N72K_V82S, Y123H, Y147R, Q154R |
| ABE9.48_monomer | Q71M_V82S, Y123H, Y147R, Q154R |
| ABE9.49_monomer | M70V, V82S, M94V, Y123H, Y147R, Q154R |
| ABE9.50_monomer | V82S, Y123H, T133K, Y147R, Q154R |
| ABE9.51_monomer | V82S, Y123H, T133K, Y147R, Q154R, A158K |
| ABE9.52_monomer | M70V, Q71M, N72K, V82S, Y123H, Y147R, |
| | Q154R |
| ABE9.53_heterodimer | N72K_V82S, Y123H, Y147R, Q154R |
| ABE9.54_heterodimer | Q71M_V82S, Y123H, Y147R, Q154R |
| ABE9.55_heterodimer | M70V, V82S, M94V, Y123H, Y147R, Q154R |
| ABE9.56_heterodimer | V82S, Y123H, T133K, Y147R, Q154R |
| ABE9.57_heterodimer | V82S, Y123H, T133K, Y147R, Q154R, A158K |
| ABE9.58_heterodimer | M70V, Q71M, N72K, V82S, Y123H, Y147R, |
| | Q154R |

[0550] In some embodiments, the base editor comprises a domain comprising all or a portion of an uracil glycosylase inhibitor (UGI). In some embodiments, the base editor comprises a domain comprising all or a portion of a nucleic acid polymerase. In some embodiments, a base editor can comprise as a domain all or a portion of a nucleic acid polymerase (NAP). For example, a base editor can comprise all or a portion of a eukaryotic NAP. In some embodiments, a NAP or portion thereof incorporated into a base editor is a DNA polymerase. In some embodiments, a NAP or portion thereof incorporated into a base editor has translesion polymerase activity. In some embodiments, a NAP or portion thereof incorporated into a base editor is a translesion DNA polymerase. In some embodiments, a NAP or portion thereof incorporated into a base editor is a Rev7, Rev1 complex, polymerase iota, polymerase kappa, or polymerase eta. In some embodiments, a NAP or portion thereof incorporated into a base editor is a eukaryotic polymerase alpha, beta, gamma, delta, epsilon, gamma, eta, iota, kappa, lambda, mu, or nu component. In some embodiments, a NAP or portion thereof incorporated into a base editor comprises an amino acid sequence that is at least 75%, 80%, 85%, 90%, 95%, 96%, 97%, 98%, 99%, or 99.5% identical to a nucleic acid polymerase (e.g., a translesion DNA polymerase). In some embodiments, a nucleic acid polymerase or portion thereof incorporated into a base editor is a translesion DNA polymerase.

[0551] In some embodiments, a domain of the base editor can comprise multiple domains. For example, the base editor comprising a polynucleotide programmable nucleotide binding domain derived from Cas9 can comprise a REC lobe and an NUC lobe corresponding to the REC lobe and NUC lobe of a wild-type or natural Cas9. In another example, the base editor can comprise one or more of a RuvCI domain, BH domain, REC1 domain, REC2 domain, RuvCII domain, L1 domain, HNH domain, L2 domain, RuvCIII domain, WED domain, TOPO domain or CTD domain. In some embodiments, one or more domains of the base editor comprise a mutation (e.g., substitution, insertion, deletion) relative to a wild-type version of a polypeptide comprising the domain. For example, an HNH domain of a polynucleotide programmable DNA binding domain can comprise an H840A substitution. In another example, a RuvCI domain of a polynucleotide programmable DNA binding domain can comprise a D10A substitution.

[0552] Different domains (e.g., adjacent domains) of the base editor disclosed herein can be connected to each other with or without the use of one or more linker domains (e.g., an XTEN linker domain). In some embodiments, a linker domain can be a bond (e.g., covalent bond), chemical group, or a molecule linking two molecules or moieties, e.g., two domains of a fusion protein, such as, for example, a first domain (e.g., Cas9-derived domain) and a second domain (e.g., an adenosine deaminase domain or a cytidine deaminase domain). In some embodiments, a linker is a covalent bond (e.g., a carbon-carbon bond, disulfide bond, carbon-hetero atom bond, etc.). In certain embodiments, a linker is a carbon nitrogen bond of an amide linkage. In certain embodiments, a linker is a cyclic or acyclic, substituted or unsubstituted, branched or unbranched aliphatic or heteroaliphatic linker. In certain embodiments, a linker is polymeric (e.g., polyethylene, polyethylene glycol, polyamide, polyester, etc.). In certain embodiments, a linker comprises a monomer, dimer, or polymer of aminoalkanoic acid. In some embodiments, a linker comprises an aminoalkanoic acid (e.g., glycine, ethanoic acid, alanine, beta-alanine, 3-aminopropanoic acid, 4-aminobutanoic acid, 5-pentanoic acid, etc.). In some embodiments, a linker comprises a monomer, dimer, or polymer of aminohexanoic acid (Ahx). In certain embodiments, a linker is based on a carbocyclic moiety (e.g., cyclopentane, cyclohexane). In other embodiments, a linker comprises a polyethylene glycol moiety (PEG). In certain embodiments, a linker comprises an aryl or heteroaryl moiety. In certain embodiments, the linker is based on a phenyl ring. A linker can include functionalized moieties to facilitate attachment of a nucleophile (e.g., thiol, amino) from the peptide to the linker. Any electrophile can be used as part of the linker. Exemplary electrophiles include, but are not limited to, activated esters, activated amides, Michael acceptors, alkyl halides, aryl halides, acyl halides, and isothiocyanates. In some embodiments, a linker joins a gRNA binding domain of an RNA-programmable nuclease, including a Cas9 nuclease domain, and the catalytic domain of a nucleic acid editing protein. In some embodiments, a linker joins a dCas9 and a second domain (e.g., UGI, etc.).

### Linkers

[0553] In certain embodiments, linkers may be used to link any of the peptides or peptide domains of the invention. The linker may be as simple as a covalent bond, or it may be a polymeric linker many atoms in length. In certain embodiments, the linker is a polypeptide or based on amino acids. In other embodiments, the linker is not peptide-like. In certain embodiments, the linker is a covalent bond (e.g., a carbon-carbon bond, disulfide bond, carbon-heteroatom bond, etc.). In certain embodiments, the linker is a carbon-nitrogen bond of an amide linkage. In certain embodiments, the linker is a cyclic or acyclic, substituted or unsubstituted, branched or unbranched aliphatic or heteroaliphatic linker. In certain embodiments, the linker is polymeric (e.g., polyethylene, polyethylene glycol, polyamide, polyester, etc.). In certain embodiments, the linker comprises a monomer, dimer, or polymer of aminoalkanoic acid. In certain embodiments, the linker comprises an aminoalkanoic acid (e.g., glycine, ethanoic acid, alanine, beta-alanine, 3-aminopropanoic acid, 4-aminobutanoic acid, 5-pentanoic acid, etc.). In certain embodiments, the linker comprises a monomer, dimer, or polymer of aminohexanoic acid (Ahx). In certain embodiments, the linker is based on a carbocyclic moiety (e.g., cyclopentane, cyclohexane). In other embodiments, the linker comprises a polyethylene glycol moiety (PEG). In other embodiments, the linker comprises amino acids. In certain embodiments, the linker comprises a peptide. In certain embodiments, the linker comprises an aryl or heteroaryl moiety. In certain embodiments, the linker is based on a phenyl ring. The linker may include functionalized moieties to facilitate attachment of a nucleophile (e.g., thiol, amino) from the peptide to the linker. Any electrophile may be used as part of the linker. Exemplary electrophiles include, but are not limited to, activated esters, activated amides, Michael acceptors, alkyl halides, aryl halides, acyl halides, and isothiocyanates.

[0554] Typically, a linker is positioned between, or flanked by, two groups, molecules, or other moieties and connected to each one via a covalent bond, thus connecting the two. In some embodiments, a linker is an amino acid or a plurality of amino acids (e.g., a peptide or protein). In some embodiments, a linker is an organic molecule, group, polymer, or chemical moiety. In some embodiments, a linker is 2-100 amino acids in length, for example, 2, 3, 4, 5, 6, 7, 8, 9, 10, 11, 12, 13, 14, 15, 16, 17, 18, 19, 20, 21, 22, 23, 24, 25, 26, 27, 28, 29, 30, 30-35, 35-40, 40-45, 45-50, 50-60, 60-70, 70-80, 80-90, 90-100, 100-150, or 150-200 amino acids in length. In some embodiments, the linker is about 3 to about 104 (e.g., 5, 6, 7, 8, 9, 10, 11, 12, 13, 14, 15, 16, 17, 18, 19, 20, 21, 22, 23, 24, 25, 26, 27, 28, 29, 30, 31, 32, 33, 34, 35, 36, 37, 38, 39, 40, 41, 42, 43, 44, 45, 46, 47, 48, 49, 50, 55, 60, 65, 70, 75, 80, 85, 90, 95, or 100) amino acids in length. Longer or shorter linkers are also contemplated.

[0555] In some embodiments, any of the fusion proteins provided herein, comprise a cytidine or adenosine deaminase and a Cas9 domain that are fused to each other via a linker. Various linker lengths and flexibilities between the cytidine or adenosine deaminase and the Cas9 domain can be employed (e.g., ranging from very flexible linkers of the form (GGGS)n (SEQ ID NO: 1308), (GGGGS)n (SEQ ID NO: 109), and (G)n to more rigid linkers of the form (EAAAK)n (SEQ ID NO: 1309), (SGGS)n (SEQ ID NO: 57), SGSETPGTSESATPES (SEQ ID NO: 56) (see, e.g., Guilinger J P, et al. Fusion of catalytically inactive Cas9 to FokI nuclease improves the specificity of genome modification. Nat. Biotechnol. 2014; 32(6): 577-82; the entire contents are incorporated herein by reference) and (XP)n) in order to achieve the optimal length for activity for the cytidine or adenosine deaminase nucleobase editor. In some embodiments, n is 1, 2, 3, 4, 5, 6, 7, 8, 9, 10, 11, 12, 13, 14, or 15. In some embodiments, the linker comprises a (GGS)n motif, wherein n is 1, 3, or 7 (SEQ ID NO: 4012). In some embodiments, cytidine deaminase or adenosine deaminase and the Cas9 domain of any of the fusion proteins provided herein are fused via a linker comprising the amino acid sequence SGSETPGTSESATPES (SEQ ID NO: 56), which can also be referred to as the XTEN linker. In some embodiments, a linker comprises a plurality of proline residues and is 5-21, 5-14, 5-9, 5-7 amino acids in length, e.g., PAPAP (SEQ ID NO: 65), PAPAPA (SEQ ID NO: 66), PAPAPAP (SEQ ID NO: 67), PAPAPAPA (SEQ ID NO: 68), P(AP)4 (SEQ ID NO: 69), P(AP)7 (SEQ ID NO: 70), P(AP)10 (SEQ ID NO: 71) (see, e.g., Tan J, Zhang F, Karcher D, Bock R. Engineering of high-precision base editors for site-specific single nucleotide replacement. Nat Commun. 2019 Jan. 25; 10(1):439; the entire contents are incorporated herein by reference). Such proline-rich linkers are also termed “rigid” linkers.

[0556] In another embodiment, the base editor system comprises a component (protein) that interacts non-covalently with a deaminase (DNA deaminase), e.g., an adenosine or a cytidine deaminase, and transiently attracts the adenosine or cytidine deaminase to the target nucleobase in a target polynucleotide sequence for specific editing, with minimal or reduced bystander or target-adjacent effects. Such a non-covalent system and method involving deaminase-interacting proteins serves to attract a DNA deaminase to a particular genomic target nucleobase and decouples the events of on-target and target-adjacent editing, thus enhancing the achievement of more precise single base substitution mutations. In an embodiment, the deaminase-interacting protein binds to the deaminase (e.g., adenosine deaminase or cytidine deaminase) without blocking or interfering with the active (catalytic) site of the deaminase from engaging the target nucleobase (e.g., adenosine or cytidine, respectively). Such as system, termed “MagnEdit,” involves interacting proteins tethered to a Cas9 and gRNA complex and can attract a co-expressed adenosine or cytidine deaminase (either exogenous or endogenous) to edit a specific genomic target site, and is described in McCann, J. et al., 2020, “MagnEdit—interacting factors that recruit DNA-editing enzymes to single base targets,” Life-Science-Alliance, Vol. 3, No. 4 (e201900606), (doi 10.26508/lsa.201900606), the contents of which are incorporated by reference herein in their entirety. In an embodiment, the DNA deaminase is an adenosine deaminase variant (e.g., TadA*8) as described herein.

[0557] In another embodiment, a system called “Suntag,” involves non-covalently interacting components used for recruiting protein (e.g., adenosine deaminase or cytidine deaminase) components, or multiple copies thereof, of base editors to polynucleotide target sites to achieve base editing at the site with reduced adjacent target editing, for example, as described in Tanenbaum, M. E. et al., “A protein tagging system for signal amplification in gene expression and fluorescence imaging,” Cell. 2014 Oct. 23; 159(3): 635-646. doi:10.1016/j.cell.2014.09.039; and in Huang, Y.-H. et al., 2017, “DNA epigenome editing using CRISPR-Cas SunTag-directed DNMT3A,” Genome Biol 18: 176. doi:10.1186/s13059-017-1306-z, the contents of each of which are incorporated by reference herein in their entirety. In an embodiment, the DNA deaminase is an adenosine deaminase variant (e.g., TadA*8) as described herein.

Nucleic Acid Programmable DNA Binding Proteins with Guide RNAs

[0558] Provided herein are compositions and methods for base editing in cells. Further provided herein are compositions comprising a guide polynucleic acid sequence, e.g. a guide RNA sequence, or a combination of 2, 3, 4, 5, 6, 7, 8, 9, 10, 11, 12, 13, 14, 15, 16, 17, 18, 19, 20, or more guide RNAs as provided herein. In some embodiments, a composition for base editing as provided herein further comprises a polynucleotide that encodes a base editor, e.g. a C-base editor or an A-base editor. For example, a composition for base editing may comprise a mRNA sequence encoding a BE, a BE4, an ABE, and a combination of one or more guide RNAs as provided. A composition for base editing may comprise a base editor polypeptide and a combination of one or more of any guide RNAs provided herein. Such a composition may be used to effect base editing in a cell through different delivery approaches, for example, electroporation, nucleofection, viral transduction or transfection. In some embodiments, the composition for base editing comprises an mRNA sequence that encodes a base editor and a combination of one or more guide RNA sequences provided herein for electroporation.

[0559] Some aspects of this disclosure provide complexes comprising any of the fusion proteins provided herein, and a guide RNA bound to a nucleic acid programmable DNA binding protein (napDNAbp) domain (e.g., a Cas9 (e.g., a dCas9, a nuclease active Cas9, or a Cas9 nickase) or Cas12) of the fusion protein. These complexes are also termed ribonucleoproteins (RNPs). In some embodiments, the guide nucleic acid (e.g., guide RNA) is from 15-100 nucleotides long and comprises a sequence of at least 10 contiguous nucleotides that is complementary to a target sequence. In some embodiments, the guide RNA is 15, 16, 17, 18, 19, 20, 21, 22, 23, 24, 25, 26, 27, 28, 29, 30, 31, 32, 33, 34, 35, 36, 37, 38, 39, 40, 41, 42, 43, 44, 45, 46, 47, 48, 49, or 50 nucleotides long. In some embodiments, the guide RNA comprises a sequence of 15, 16, 17, 18, 19, 20, 21, 22, 23, 24, 25, 26, 27, 28, 29, 30, 31, 32, 33, 34, 35, 36, 37, 38, 39, or 40 contiguous nucleotides that is complementary to a target sequence. In some embodiments, the target sequence is a DNA sequence. In some embodiments, the target sequence is an RNA sequence. In some embodiments, the target sequence is a sequence in the genome of a bacteria, yeast, fungi, insect, plant, or animal. In some embodiments, the target sequence is a sequence in the genome of a human. In some embodiments, the 3′ end of the target sequence is immediately adjacent to a canonical PAM sequence (NGG). In some embodiments, the 3′ end of the target sequence is immediately adjacent to a non-canonical PAM sequence (e.g., a sequence listed in Table 6 or 5′-NAA-3′). In some embodiments, the guide nucleic acid (e.g., guide RNA) is complementary to a sequence in a gene of interest (e.g., a gene associated with a disease or disorder).

[0560] Some aspects of this disclosure provide methods of using the fusion proteins, or complexes provided herein. For example, some aspects of this disclosure provide methods comprising contacting a DNA molecule with any of the fusion proteins provided herein, and with at least one guide RNA, wherein the guide RNA is about 15-100 nucleotides long and comprises a sequence of at least 10 contiguous nucleotides that is complementary to a target sequence. In some embodiments, the 3′ end of the target sequence is immediately adjacent to an AGC, GAG, TTT, GTG, or CAA sequence. In some embodiments, the 3′ end of the target sequence is immediately adjacent to an NGA, NGCG, NGN, NNGRRT, NNNRRT, NGCG, NGCN, NGTN, NGTN, NGTN, or 5′ (TTTV) sequence. In some embodiments, the 3′ end of the target sequence is immediately adjacent to an e.g., TTN, DTTN, GTTN, ATTN, ATTC, DTTNT, WTTN, HATY, TTTN, TTTV, TTTC, TG, RTR, or YTN PAM site.

[0561] It will be understood that the numbering of the specific positions or residues in the respective sequences depends on the particular protein and numbering scheme used. Numbering might differ, e.g., in precursors of a mature protein and the mature protein itself, and differences in sequences from species to species may affect numbering. One of skill in the art will be able to identify the respective residue in any homologous protein and in the respective encoding nucleic acid by methods well known in the art, e.g., by sequence alignment and determination of homologous residues.

[0562] It will be apparent to those of skill in the art that in order to target any of the fusion proteins disclosed herein, to a target site, e.g., a site comprising a mutation to be edited, it is typically necessary to co-express the fusion protein together with a guide RNA. As explained in more detail elsewhere herein, a guide RNA typically comprises a tracrRNA framework allowing for napDNAbp (e.g., Cas9 or Cas12) binding, and a guide sequence, which confers sequence specificity to the napDNAbp:nucleic acid editing enzyme/domain fusion protein. Alternatively, the guide RNA and tracrRNA may be provided separately, as two nucleic acid molecules. In some embodiments, the guide RNA comprises a structure, wherein the guide sequence comprises a sequence that is complementary to the target sequence. The guide sequence is typically 20 nucleotides long. The sequences of suitable guide RNAs for targeting napDNAbp:nucleic acid editing enzyme/domain fusion proteins to specific genomic target sites will be apparent to those of skill in the art based on the instant disclosure. Such suitable guide RNA sequences typically comprise guide sequences that are complementary to a nucleic sequence within 50 nucleotides upstream or downstream of the target nucleotide to be edited. Some exemplary guide RNA sequences suitable for targeting any of the provided fusion proteins to specific target sequences are provided herein.

[0563] Distinct portions of sgRNA are predicted to form various features that interact with Cas9 (e.g., SpyCas9) and/or the DNA target. Six conserved modules have been identified within native crRNA:tracrRNA duplexes and single guide RNAs (sgRNAs) that direct Cas9 endonuclease activity (see Briner et al., Guide RNA Functional Modules Direct Cas9 Activity and Orthogonality Mol Cell. 2014 Oct. 23; 56(2):333-339). The six modules include the spacer responsible for DNA targeting, the upper stem, bulge, lower stem formed by the CRISPR repeat:tracrRNA duplex, the nexus, and hairpins from the 3′ end of the tracrRNA. The upper and lower stems interact with Cas9 mainly through sequence-independent interactions with the phosphate backbone. In some embodiments, the upper stem is dispensable. In some embodiments, the conserved uracil nucleotide sequence at the base of the lower stem is dispensable. The bulge participates in specific side-chain interactions with the Rec1 domain of Cas9. The nucleobase of U44 interacts with the side chains of Tyr 325 and His 328, while G43 interacts with Tyr 329. The nexus forms the core of the sgRNA:Cas9 interactions and lies at the intersection between the sgRNA and both Cas9 and the target DNA. The nucleobases of A51 and A52 interact with the side chain of Phe 1105; U56 interacts with Arg 457 and Asn 459; the nucleobase of U59 inserts into a hydrophobic pocket defined by side chains of Arg 74, Asn 77, Pro 475, Leu 455, Phe 446, and Ile 448; C60 interacts with Leu 455, Ala 456, and Asn 459, and C61 interacts with the side chain of Arg 70, which in turn interacts with C15. In some embodiments, one or more of these mutations are made in the bulge and/or the nexus of a sgRNA for a Cas9 (e.g., spyCas9) to optimize sgRNA:Cas9 interactions.

[0564] Moreover, the tracrRNA nexus and hairpins are critical for Cas9 pairing and can be swapped to cross orthogonality barriers separating disparate Cas9 proteins, which is instrumental for further harnessing of orthogonal Cas9 proteins. In some embodiments, the nexus and hairpins are swapped to target orthogonal Cas9 proteins. In some embodiments, a sgRNA is dispensed of the upper stem, hairpin 1, and/or the sequence flexibility of the lower stem to design a guide RNA that is more compact and conformationally stable. In some embodiments, the modules are modified to optimize multiplex editing using a single Cas9 with various chimeric guides or by concurrently using orthogonal systems with different combinations of chimeric sgRNAs. Details regarding guide functional modules and methods thereof are described, for example, in Briner et al., Guide RNA Functional Modules Direct Cas9 Activity and Orthogonality Mol Cell. 2014 Oct. 23; 56(2):333-339, the contents of which is incorporated by reference herein in its entirety.

[0565] The domains of the base editor disclosed herein can be arranged in any order. Non-limiting examples of a base editor comprising a fusion protein comprising e.g., a polynucleotide-programmable nucleotide-binding domain (e.g., Cas9 or Cas12) and a deaminase domain (e.g., cytidine or adenosine deaminase) can be arranged as follows:

[0566] NH2-[nucleobase editing domain]-Linker1-[nucleobase editing domain]-COOH;

[0567] NH2-[deaminase]-Linker1-[nucleobase editing domain]-COOH;

[0568] NH2-[deaminase]-Linker1-[nucleobase editing domain]-Linker2-[UGI]-COOH;

[0569] NH2-[deaminase]-Linker1-[nucleobase editing domain]-COOH;

[0570] NH2-[adenosine deaminase]-Linker1-[nucleobase editing domain]-COOH;

[0571] NH2-[nucleobase editing domain]-[deaminase]-COOH;

[0572] NH2-[deaminase]-[nucleobase editing domain]-[inosine BER inhibitor]-COOH;

[0573] NH2-[deaminase]-[inosine BER inhibitor]-[nucleobase editing domain]-COOH;

[0574] NH2-[inosine BER inhibitor]-[deaminase]-[nucleobase editing domain]-COOH;

[0575] NH2-[nucleobase editing domain]-[deaminase]-[inosine BER inhibitor]-COOH;

[0576] NH2-[nucleobase editing domain]-[inosine BER inhibitor]-[deaminase]-COOH;

[0577] NH2-[inosine BER inhibitor]-[nucleobase editing domain]-[deaminase]-COOH;

[0578] NH2-[nucleobase editing domain]-Linker1-[deaminase]-Linker2-[nucleobase editing domain]-COOH;

[0579] NH2-[nucleobase editing domain]-Linker1-[deaminase]-[nucleobase editing domain]-COOH;

[0580] NH2-[nucleobase editing domain]-[deaminase]-Linker2-[nucleobase editing domain]-COOH;

[0581] NH2-[nucleobase editing domain]-[deaminase]-[nucleobase editing domain]-COOH;

[0582] NH2-[nucleobase editing domain]-Linker1-[deaminase]-Linker2-[nucleobase editing domain]-[inosine BER inhibitor]-COOH;

[0583] NH2-[nucleobase editing domain]-Linker1-[deaminase]-[nucleobase editing domain]-[inosine BER inhibitor]-COOH;

[0584] NH2-[nucleobase editing domain]-[deaminase]-Linker2-[nucleobase editing domain]-[inosine BER inhibitor]-COOH;

[0585] NH2-[nucleobase editing domain]-[deaminase]-[nucleobase editing domain]-[inosine BER inhibitor]-COOH;

[0586] NH2-[inosine BER inhibitor]-[nucleobase editing domain]-Linker1-[deaminase]-Linker2-[nucleobase editing domain]-COOH;

[0587] NH2-[inosine BER inhibitor]-[nucleobase editing domain]-Linker1-[deaminase]-[nucleobase editing domain]-COOH;

[0588] NH2-[inosine BER inhibitor]-[nucleobase editing domain]-[deaminase]-Linker2-[nucleobase editing domain]-COOH; or

[0589] NH2-[inosine BER inhibitor]NH2-[nucleobase editing domain]-[deaminase]-[nucleobase editing domain]-COOH.

[0590] In some embodiments, the base editing fusion proteins provided herein need to be positioned at a precise location, for example, where a target base is placed within a defined region (e.g., a “deamination window”). In some embodiments, a target can be within a 4-base region. In some embodiments, such a defined target region can be approximately 15 bases upstream of the PAM. See Komor, A. C., et al., “Programmable editing of a target base in genomic DNA without double-stranded DNA cleavage” Nature 533, 420-424 (2016); Gaudelli, N. M., et al., “Programmable base editing of A•T to G•C in genomic DNA without DNA cleavage” Nature 551, 464-471 (2017); and Komor, A. C., et al., “Improved base excision repair inhibition and bacteriophage Mu Gam protein yields C:G-to-T:A base editors with higher efficiency and product purity” Science Advances 3:eaao4774 (2017), the entire contents of which are hereby incorporated by reference.

[0591] A defined target region can be a deamination window. A deamination window can be the defined region in which a base editor acts upon and deaminates a target nucleotide. In some embodiments, the deamination window is within a 2, 3, 4, 5, 6, 7, 8, 9, or 10 base regions. In some embodiments, the deamination window is 5, 6, 7, 8, 9, 10, 11, 12, 13, 14, 15, 16, 17, 18, 19, 20, 21, 22, 23, 24, or 25 bases upstream of the PAM.

[0592] The base editors of the present disclosure can comprise any domain, feature or amino acid sequence which facilitates the editing of a target polynucleotide sequence. For example, in some embodiments, the base editor comprises a nuclear localization sequence (NLS). In some embodiments, an NLS of the base editor is localized between a deaminase domain and a napDNAbp domain. In some embodiments, an NLS of the base editor is localized C-terminal to a napDNAbp domain.

[0593] Non-limiting examples of protein domains which can be included in the fusion protein include a deaminase domain (e.g., adenosine deaminase or cytidine deaminase), a uracil glycosylase inhibitor (UGI) domain, epitope tags, reporter gene sequences, and/or protein domains having one or more of the activities described herein.

[0594] A domain may be detected or labeled with an epitope tag, a reporter protein, other binding domains. Non-limiting examples of epitope tags include histidine (His) tags, V5 tags, FLAG tags, influenza hemagglutinin (HA) tags, Myc tags, VSV-G tags, and thioredoxin (Trx) tags. Examples of reporter genes include, but are not limited to, glutathione-5-transferase (GST), horseradish peroxidase (HRP), chloramphenicol acetyltransferase (CAT) beta-galactosidase, beta-glucuronidase, luciferase, green fluorescent protein (GFP), HcRed, DsRed, cyan fluorescent protein (CFP), yellow fluorescent protein (YFP), and autofluorescent proteins including blue fluorescent protein (BFP). Additional protein sequences can include amino acid sequences that bind DNA molecules or bind other cellular molecules, including but not limited to maltose binding protein (MBP), S-tag, Lex A DNA binding domain (DBD) fusions, GAL4 DNA binding domain fusions, and herpes simplex virus (HSV) BP16 protein fusions.

### Methods of Using Fusion Proteins Comprising a Cytidine or Adenosine Deaminase and a Cas9 Domain

[0595] Some aspects of this disclosure provide methods of using the fusion proteins, or complexes provided herein. For example, some aspects of this disclosure provide methods comprising contacting a DNA molecule with any of the fusion proteins provided herein, and with at least one guide RNA described herein.

[0596] In some embodiments, a fusion protein of the invention is used for editing a target gene of interest. In particular, a cytidine deaminase or adenosine deaminase nucleobase editor described herein is capable of making multiple mutations within a target sequence. These mutations may affect the function of the target. For example, when a cytidine deaminase or adenosine deaminase nucleobase editor is used to target a regulatory region the function of the regulatory region is altered and the expression of the downstream protein is reduced or eliminated.

[0597] It will be understood that the numbering of the specific positions or residues in the respective sequences depends on the particular protein and numbering scheme used. Numbering might be different, e.g., in precursors of a mature protein and the mature protein itself, and differences in sequences from species to species may affect numbering. One of skill in the art will be able to identify the respective residue in any homologous protein and in the respective encoding nucleic acid by methods well known in the art, e.g., by sequence alignment and determination of homologous residues.

[0598] It will be apparent to those of skill in the art that in order to target any of the fusion proteins comprising a Cas9 domain and a cytidine or adenosine deaminase, as disclosed herein, to a target site, e.g., a site comprising a mutation to be edited, a guide RNA, e.g., an sgRNA, may be co-expressed. As explained in more detail elsewhere herein, a guide RNA typically comprises a tracrRNA framework allowing for Cas9 binding, and a guide sequence, which confers sequence specificity to the Cas9:nucleic acid editing enzyme/domain fusion protein. Alternatively, the guide RNA and tracrRNA may be provided separately, as two nucleic acid molecules. In some embodiments, the guide RNA comprises a structure, wherein the guide sequence comprises a sequence that is complementary to the target sequence. The guide sequence is typically 20 nucleotides long. The sequences of suitable guide RNAs for targeting Cas9:nucleic acid editing enzyme/domain fusion proteins to specific genomic target sites will be apparent to those of skill in the art based on the instant disclosure. Such suitable guide RNA sequences typically comprise guide sequences that are complementary to a nucleic sequence within 50 nucleotides upstream or downstream of the target nucleotide to be edited. Some exemplary guide RNA sequences suitable for targeting any of the provided fusion proteins to specific target sequences are provided herein.

### Base Editor Efficiency

[0599] In some embodiments, the purpose of the methods provided herein is to alter a gene and/or gene product via nucleic acid editing. The nucleobase editing proteins provided herein can be used for gene nucleic acid editing-based human therapeutics in vitro or in vivo. It will be understood by the skilled artisan that the nucleobase editing proteins provided herein, e.g., the fusion proteins comprising a polynucleotide programmable nucleotide binding domain (e.g., Cas9) and a nucleobase editing domain (e.g., an adenosine deaminase domain or a cytidine deaminase domain) can be used to edit a nucleotide from A to G or C to T.

[0600] Advantageously, base editing systems as provided herein provide genome editing without generating double-strand DNA breaks, without requiring a donor DNA template, and without inducing an excess of stochastic insertions and deletions as CRISPR may do. In some embodiments, the present disclosure provides base editors that efficiently generate an intended mutation, such as a STOP codon, in a nucleic acid (e.g., a nucleic acid within a genome of a subject) without generating a significant number of unintended mutations, such as unintended point mutations. In some embodiments, an intended mutation is a mutation that is generated by a specific base editor (e.g., adenosine base editor or cytidine base editor) bound to a guide polynucleotide (e.g., gRNA), specifically designed to generate the intended mutation. In some embodiments, the intended mutation is in a gene associated with a target antigen associated with a disease or disorder, e.g., a neurological or ophthalmological disease or disorder. In some embodiments, the intended mutation is an adenine (A) to guanine (G) point mutation (e.g., SNP) in a gene associated with a target antigen associated with a disease or disorder, e.g. a neurological or ophthalmological disease or disorder. In some embodiments, the intended mutation is an adenine (A) to guanine (G) point mutation within the coding region or non-coding region of a gene (e.g., regulatory region or element). In some embodiments, the intended mutation is a cytosine (C) to thymine (T) point mutation (e.g., SNP) in a gene associated with a target antigen associated with a disease or disorder, e.g., a neurological or ophthalmological disease or disorder. In some embodiments, the intended mutation is a cytosine (C) to thymine (T) point mutation within the coding region or non-coding region of a gene (e.g., regulatory region or element). In some embodiments, the intended mutation is a point mutation that generates a STOP codon, for example, a premature STOP codon within the coding region of a gene. In some embodiments, the intended mutation is a mutation that eliminates a stop codon.

[0601] The base editors of the invention advantageously modify a specific nucleotide base encoding a protein without generating a significant proportion of indels. An “indel”, as used herein, refers to the insertion or deletion of a nucleotide base within a nucleic acid. Such insertions or deletions can lead to frame shift mutations within a coding region of a gene. In some embodiments, it is desirable to generate base editors that efficiently modify (e.g. mutate) a specific nucleotide within a nucleic acid, without generating a large number of insertions or deletions (i.e., indels) in the nucleic acid. In some embodiments, it is desirable to generate base editors that efficiently modify (e.g. mutate or methylate) a specific nucleotide within a nucleic acid, without generating a large number of insertions or deletions (i.e., indels) in the nucleic acid. In certain embodiments, any of the base editors provided herein can generate a greater proportion of intended modifications (e.g., methylations) versus indels. In certain embodiments, any of the base editors provided herein can generate a greater proportion of intended modifications (e.g., mutations) versus indels.

[0602] In some embodiments, the base editors provided herein are capable of generating a ratio of intended mutations to indels (i.e., intended point mutations:unintended point mutations) that is greater than 1:1. In some embodiments, the base editors provided herein are capable of generating a ratio of intended mutations to indels that is at least 1.5:1, at least 2:1, at least 2.5:1, at least 3:1, at least 3.5:1, at least 4:1, at least 4.5:1, at least 5:1, at least 5.5:1, at least 6:1, at least 6.5:1, at least 7:1, at least 7.5:1, at least 8:1, at least 10:1, at least 12:1, at least 15:1, at least 20:1, at least 25:1, at least 30:1, at least 40:1, at least 50:1, at least 100:1, at least 200:1, at least 300:1, at least 400:1, at least 500:1, at least 600:1, at least 700:1, at least 800:1, at least 900:1, or at least 1000:1, or more. The number of intended mutations and indels may be determined using any suitable method.

[0603] In some embodiments, the base editors provided herein can limit formation of indels in a region of a nucleic acid. In some embodiments, the region is at a nucleotide targeted by a base editor or a region within 2, 3, 4, 5, 6, 7, 8, 9, or 10 nucleotides of a nucleotide targeted by a base editor. In some embodiments, any of the base editors provided herein can limit the formation of indels at a region of a nucleic acid to less than 1%, less than 1.5%, less than 2%, less than 2.5%, less than 3%, less than 3.5%, less than 4%, less than 4.5%, less than 5%, less than 6%, less than 7%, less than 8%, less than 9%, less than 10%, less than 12%, less than 15%, or less than 20%. The number of indels formed at a nucleic acid region may depend on the amount of time a nucleic acid (e.g., a nucleic acid within the genome of a cell) is exposed to a base editor. In some embodiments, a number or proportion of indels is determined after at least 1 hour, at least 2 hours, at least 6 hours, at least 12 hours, at least 24 hours, at least 36 hours, at least 48 hours, at least 3 days, at least 4 days, at least 5 days, at least 7 days, at least 10 days, or at least 14 days of exposing a nucleic acid (e.g., a nucleic acid within the genome of a cell) to a base editor.

[0604] Some aspects of the disclosure are based on the recognition that any of the base editors provided herein are capable of efficiently generating an intended mutation in a nucleic acid (e.g. a nucleic acid within a genome of a subject) without generating a considerable number of unintended mutations (e.g., spurious off-target editing or bystander editing). In some embodiments, an intended mutation is a mutation that is generated by a specific base editor bound to a gRNA, specifically designed to generate the intended mutation. In some embodiments, the intended mutation is a mutation that generates a stop codon, for example, a premature stop codon within the coding region of a gene. In some embodiments, the intended mutation is a mutation that eliminates a stop codon. In some embodiments, the intended mutation is a mutation that alters the splicing of a gene. In some embodiments, the intended mutation is a mutation that alters the regulatory sequence of a gene (e.g., a gene promotor or gene repressor). In some embodiments, any of the base editors provided herein are capable of generating a ratio of intended mutations to unintended mutations (e.g., intended mutations:unintended mutations) that is greater than 1:1. In some embodiments, any of the base editors provided herein are capable of generating a ratio of intended mutations to unintended mutations that is at least 1.5:1, at least 2:1, at least 2.5:1, at least 3:1, at least 3.5:1, at least 4:1, at least 4.5:1, at least 5:1, at least 5.5:1, at least 6:1, at least 6.5:1, at least 7:1, at least 7.5:1, at least 8:1, at least 10:1, at least 12:1, at least 15:1, at least 20:1, at least 25:1, at least 30:1, at least 40:1, at least 50:1, at least 100:1, at least 150:1, at least 200:1, at least 250:1, at least 500:1, or at least 1000:1, or more. It should be appreciated that the characteristics of the base editors described herein may be applied to any of the fusion proteins, or methods of using the fusion proteins provided herein.

[0605] Base editing is often referred to as a “modification”, such as, a genetic modification, a gene modification and modification of the nucleic acid sequence and is clearly understandable based on the context that the modification is a base editing modification. A base editing modification is therefore a modification at the nucleotide base level, for example as a result of the deaminase activity discussed throughout the disclosure, which then results in a change in the gene sequence, and may affect the gene product. In essence therefore, the nucleic acid editing modification described herein may result in a modification of the gene, structurally and/or functionally, wherein the expression of the gene product may be modified, for example, the expression of the gene is knocked out; or conversely, enhanced, or, in some circumstances, the gene function or activity may be modified. Using the methods disclosed herein, a base editing efficiency may be determined as the knockdown efficiency of the gene in which the base editing is performed, wherein the base editing is intended to knockdown the expression of the gene. A knockdown level may be validated quantitatively by determining the expression level by any detection assay, such as assay for protein expression level, for example, by flow cytometry; assay for detecting RNA expression such as quantitative RT-PCR, northern blot analysis, or any other suitable assay such as pyrosequencing; and may be validated qualitatively by nucleotide sequencing reactions.

[0606] In some embodiments, the modification, e.g., single base edit results in at least 10% reduction of the gene targeted expression. In some embodiments, the base editing efficiency may result in at least 10% reduction of the gene targeted expression. In some embodiments, the base editing efficiency may result in at least 20% reduction of the gene targeted expression. In some embodiments, the base editing efficiency may result in at least 30% reduction of the gene targeted expression. In some embodiments, the base editing efficiency may result in at least 40% reduction of the gene targeted expression. In some embodiments, the base editing efficiency may result in at least 50% reduction of the gene targeted expression. In some embodiments, the base editing efficiency may result in at least 60% reduction of the targeted gene expression. In some embodiments, the base editing efficiency may result in at least 70% reduction of the targeted gene expression. In some embodiments, the base editing efficiency may result in at least 80% reduction of the targeted gene expression. In some embodiments, the base editing efficiency may result in at least 90% reduction of the targeted gene expression. In some embodiments, the base editing efficiency may result in at least 91% reduction of the targeted gene expression. In some embodiments, the base editing efficiency may result in at least 92% reduction of the targeted gene expression. In some embodiments, the base editing efficiency may result in at least 93% reduction of the targeted gene expression. In some embodiments, the base editing efficiency may result in at least 94% reduction of the targeted gene expression. In some embodiments, the base editing efficiency may result in at least 95% reduction of the targeted gene expression. In some embodiments, the base editing efficiency may result in at least 96% reduction of the targeted gene expression. In some embodiments, the base editing efficiency may result in at least 97% reduction of the targeted gene expression. In some embodiments, the base editing efficiency may result in at least 98% reduction of the targeted gene expression. In some embodiments, the base editing efficiency may result in at least 99% reduction of the targeted gene expression. In some embodiments, the base editing efficiency may result in knockout (100% knockdown of the gene expression) of the gene that is targeted.

[0607] In some embodiments, any of base editor systems provided herein result in less than 50%, less than 40%, less than 30%, less than 20%, less than 19%, less than 18%, less than 17%, less than 16%, less than 15%, less than 14%, less than 13%, less than 12%, less than 11%, less than 10%, less than 9%, less than 8%, less than 7%, less than 6%, less than 5%, less than 4%, less than 3%, less than 2%, less than 1%, less than 0.9%, less than 0.8%, less than 0.7%, less than 0.6%, less than 0.5%, less than 0.4%, less than 0.3%, less than 0.2%, less than 0.1%, less than 0.09%, less than 0.08%, less than 0.07%, less than 0.06%, less than 0.05%, less than 0.04%, less than 0.03%, less than 0.02%, or less than 0.01% indel formation in the target polynucleotide sequence.

[0608] In some embodiments, targeted modifications, e.g., single base editing, are used simultaneously to target at least 4, 5, 6, 7, 8, 9, 10, 11, 12 13, 14, 15, 16, 17, 18, 19, 20, 21, 22, 23, 24, 25, 26, 27, 28, 29, 30, 31, 32, 33, 34, 35, 36, 37, 38, 39, 40, 41, 42, 43, 44, 45, 46, 47, 48, 49 or 50 different endogenous sequences for base editing with different guide RNAs. In some embodiments, targeted modifications, e.g. single base editing, are used to sequentially target at least 4, 5, 6, 7, 8, 9, 10, 11, 12 13, 14, 15, 16, 17, 18, 19, 20, 21, 22, 23, 24, 25, 26, 27, 28, 29, 30, 31, 32, 33, 34, 35, 36, 37, 38, 39, 40, 41, 42, 43, 44, 45, 46, 47, 48, 49 50, or more different endogenous gene sequences for base editing with different guide RNAs.

[0609] Some aspects of the disclosure are based on the recognition that any of the base editors provided herein are capable of efficiently generating an intended mutation, such as a point mutation, in a nucleic acid (e.g., a nucleic acid within a genome of a subject) without generating a significant number of unintended mutations, such as unintended point mutations (i.e., mutation of bystanders). In some embodiments, any of the base editors provided herein are capable of generating at least 0.01% of intended mutations (i.e., at least 0.01% base editing efficiency). In some embodiments, any of the base editors provided herein are capable of generating at least 0.01%, 1%, 2%, 3%, 4%, 5%, 10%, 15%, 20%, 25%, 30%, 40%, 45%, 50%, 60%, 70%, 80%, 90%, 95%, or 99% of intended mutations.

[0610] In some embodiments, any of base editor systems comprising one of the ABE8 base editor variants described herein result in less than 50%, less than 40%, less than 30%, less than 20%, less than 19%, less than 18%, less than 17%, less than 16%, less than 15%, less than 14%, less than 13%, less than 12%, less than 11%, less than 10%, less than 9%, less than 8%, less than 7%, less than 6%, less than 5%, less than 4%, less than 3%, less than 2%, less than 1%, less than 0.9%, less than 0.8%, less than 0.7%, less than 0.6%, less than 0.5%, less than 0.4%, less than 0.3%, less than 0.2%, less than 0.1%, less than 0.09%, less than 0.08%, less than 0.07%, less than 0.06%, less than 0.05%, less than 0.04%, less than 0.03%, less than 0.02%, or less than 0.01% indel formation in the target polynucleotide sequence. In some embodiments, any of base editor systems comprising one of the ABE8 base editor variants described herein result in less than 0.8% indel formation in the target polynucleotide sequence. In some embodiments, any of base editor systems comprising one of the ABE8 base editor variants described herein result in at most 0.8% indel formation in the target polynucleotide sequence. In some embodiments, any of base editor systems comprising one of the ABE8 base editor variants described herein result in less than 0.3% indel formation in the target polynucleotide sequence. In some embodiments, any of base editor systems comprising one of the ABE8 base editor variants described results in lower indel formation in the target polynucleotide sequence compared to a base editor system comprising one of ABE7 base editors. In some embodiments, any of base editor systems comprising one of the ABE8 base editor variants described herein results in lower indel formation in the target polynucleotide sequence compared to a base editor system comprising an ABE7.10.

[0611] In some embodiments, any of base editor systems comprising one of the ABE8 base editor variants described herein has reduction in indel frequency compared to a base editor system comprising one of the ABE7 base editors. In some embodiments, any of base editor systems comprising one of the ABE8 base editor variants described herein has at least 0.01%, at least 1%, at least 2%, at least 3%, at least 4%, at least 5%, at least 10%, at least 15%, at least 20%, at least 25%, at least 30%, at least 35%, at least 40%, at least 45%, at least 50%, at least 55%, at least 60%, at least 65%, at least 70%, at least 75%, at least 80%, at least 85%, at least 90%, or at least 95% reduction in indel frequency compared to a base editor system comprising one of the ABE7 base editors. In some embodiments, a base editor system comprising one of the ABE8 base editor variants described herein has at least 0.01%, at least 1%, at least 2%, at least 3%, at least 4%, at least 5%, at least 10%, at least 15%, at least 20%, at least 25%, at least 30%, at least 35%, at least 40%, at least 45%, at least 50%, at least 55%, at least 60%, at least 65%, at least 70%, at least 75%, at least 80%, at least 85%, at least 90%, or at least 95% reduction in indel frequency compared to a base editor system comprising an ABE7.10.

[0612] The invention provides adenosine deaminase variants (e.g., ABE8 variants) that have increased efficiency and specificity. In particular, the adenosine deaminase variants described herein are more likely to edit a desired base within a polynucleotide, and are less likely to edit bases that are not intended to be altered (e.g., “bystanders”).

[0613] In some embodiments, any of the base editing system comprising one of the ABE8 base editor variants described herein has reduced bystander editing or mutations. In some embodiments, an unintended editing or mutation is a bystander mutation or bystander editing, for example, base editing of a target base (e.g., A or C) in an unintended or non-target position in a target window of a target nucleotide sequence. In some embodiments, any of the base editing system comprising one of the ABE8 base editor variants described herein has reduced bystander editing or mutations compared to a base editor system comprising an ABE7 base editor, e.g., ABE7.10. In some embodiments, any of the base editing system comprising one of the ABE8 base editor variants described herein has reduced bystander editing or mutations by at least 1%, at least 2%, at least 3%, at least 4%, at least 5%, at least 10%, at least 15%, at least 20%, at least 25%, at least 30%, at least 35%, at least 40%, at least 45%, at least 50%, at least 55%, at least 60%, at least 65%, at least 70%, at least 75%, at least 80%, at least 85%, at least 90%, at least 95%, or at least 99% compared to a base editor system comprising an ABE7 base editor, e.g., ABE7.10. In some embodiments, any of the base editing system comprising one of the ABE8 base editor variants described herein has reduced bystander editing or mutations by at least 1.1 fold, at least 1.2 fold, at least 1.3 fold, at least 1.4 fold, at least 1.5 fold, at least 1.6 fold, at least 1.7 fold, at least 1.8 fold, at least 1.9 fold, at least 2.0 fold, at least 2.1 fold, at least 2.2 fold, at least 2.3 fold, at least 2.4 fold, at least 2.5 fold, at least 2.6 fold, at least 2.7 fold, at least 2.8 fold, at least 2.9 fold, or at least 3.0 fold compared to a base editor system comprising an ABE7 base editor, e.g., ABE7.10.

[0614] In some embodiments, any of the base editing system comprising one of the ABE8 base editor variants described herein has reduced spurious editing. In some embodiments, an unintended editing or mutation is a spurious mutation or spurious editing, for example, non-specific editing or guide independent editing of a target base (e.g., A or C) in an unintended or non-target region of the genome. In some embodiments, any of the base editing system comprising one of the ABE8 base editor variants described herein has reduced spurious editing compared to a base editor system comprising an ABE7 base editor, e.g., ABE7.10. In some embodiments, any of the base editing system comprising one of the ABE8 base editor variants described herein has reduced spurious editing by at least 1%, at least 2%, at least 3%, at least 4%, at least 5%, at least 10%, at least 15%, at least 20%, at least 25%, at least 30%, at least 35%, at least 40%, at least 45%, at least 50%, at least 55%, at least 60%, at least 65%, at least 70%, at least 75%, at least 80%, at least 85%, at least 90%, at least 95%, or at least 99% compared to a base editor system comprising an ABE7 base editor, e.g., ABE7.10. In some embodiments, any of the base editing system comprising one of the ABE8 base editor variants described herein has reduced spurious editing by at least 1.1 fold, at least 1.2 fold, at least 1.3 fold, at least 1.4 fold, at least 1.5 fold, at least 1.6 fold, at least 1.7 fold, at least 1.8 fold, at least 1.9 fold, at least 2.0 fold, at least 2.1 fold, at least 2.2 fold, at least 2.3 fold, at least 2.4 fold, at least 2.5 fold, at least 2.6 fold, at least 2.7 fold, at least 2.8 fold, at least 2.9 fold, or at least 3.0 fold compared to a base editor system comprising an ABE7 base editor, e.g., ABE7.10.

[0615] In some embodiments, any of the ABE8 base editor variants described herein have at least 0.01%, at least 1%, at least 2%, at least 3%, at least 4%, at least 5%, at least 10%, at least 15%, at least 20%, at least 25%, at least 30%, at least 35%, at least 40%, at least 45%, at least 50%, at least 55%, at least 60%, at least 65%, at least 70%, at least 75%, at least 80%, at least 85%, at least 90%, at least 95%, or at least 99% base editing efficiency. In some embodiments, the base editing efficiency may be measured by calculating the percentage of edited nucleobases in a population of cells. In some embodiments, any of the ABE8 base editor variants described herein have base editing efficiency of at least 0.01%, at least 1%, at least 2%, at least 3%, at least 4%, at least 5%, at least 10%, at least 15%, at least 20%, at least 25%, at least 30%, at least 35%, at least 40%, at least 45%, at least 50%, at least 55%, at least 60%, at least 65%, at least 70%, at least 75%, at least 80%, at least 85%, at least 90%, at least 95%, or at least 99% as measured by edited nucleobases in a population of cells.

[0616] In some embodiments, any of the ABE8 base editor variants described herein has higher base editing efficiency compared to the ABE7 base editors. In some embodiments, any of the ABE8 base editor variants described herein have at least 1%, at least 2%, at least 3%, at least 4%, at least 5%, at least 10%, at least 15%, at least 20%, at least 25%, at least 30%, at least 35%, at least 40%, at least 45%, at least 50%, at least 55%, at least 60%, at least 65%, at least 70%, at least 75%, at least 80%, at least 85%, at least 90%, at least 95%, at least 99%, at least 100%, at least 105%, at least 110%, at least 115%, at least 120%, at least 125%, at least 130%, at least 135%, at least 140%, at least 145%, at least 150%, at least 155%, at least 160%, at least 165%, at least 170%, at least 175%, at least 180%, at least 185%, at least 190%, at least 195%, at least 200%, at least 210%, at least 220%, at least 230%, at least 240%, at least 250%, at least 260%, at least 270%, at least 280%, at least 290%, at least 300%, at least 310%, at least 320%, at least 330%, at least 340%, at least 350%, at least 360%, at least 370%, at least 380%, at least 390%, at least 400%, at least 450%, or at least 500% higher base editing efficiency compared to an ABE7 base editor, e.g., ABE7.10.

[0617] In some embodiments, any of the ABE8 base editor variants described herein has at least 1.1 fold, at least 1.2 fold, at least 1.3 fold, at least 1.4 fold, at least 1.5 fold, at least 1.6 fold, at least 1.7 fold, at least 1.8 fold, at least 1.9 fold, at least 2.0 fold, at least 2.1 fold, at least 2.2 fold, at least 2.3 fold, at least 2.4 fold, at least 2.5 fold, at least 2.6 fold, at least 2.7 fold, at least 2.8 fold, at least 2.9 fold, at least 3.0 fold, at least 3.1 fold, at least 3.2, at least 3.3 fold, at least 3.4 fold, at least 3.5 fold, at least 3.6 fold, at least 3.7 fold, at least 3.8 fold, at least 3.9 fold, at least 4.0 fold, at least 4.1 fold, at least 4.2 fold, at least 4.3 fold, at least 4.4 fold, at least 4.5 fold, at least 4.6 fold, at least 4.7 fold, at least 4.8 fold, at least 4.9 fold, or at least 5.0 fold higher base editing efficiency compared to an ABE7 base editor, e.g., ABE7.10.

[0618] In some embodiments, any of the ABE8 base editor variants described herein have at least 0.01%, at least 1%, at least 2%, at least 3%, at least 4%, at least 5%, at least 10%, at least 15%, at least 20%, at least 25%, at least 30%, at least 35%, at least 40%, at least 45%, at least 50%, at least 55%, at least 60%, at least 65%, at least 70%, at least 75%, at least 80%, at least 85%, at least 90%, at least 95%, or at least 99% on-target base editing efficiency. In some embodiments, any of the ABE8 base editor variants described herein have on-target base editing efficiency of at least 0.01%, at least 1%, at least 2%, at least 3%, at least 4%, at least 5%, at least 10%, at least 15%, at least 20%, at least 25%, at least 30%, at least 35%, at least 40%, at least 45%, at least 50%, at least 55%, at least 60%, at least 65%, at least 70%, at least 75%, at least 80%, at least 85%, at least 90%, at least 95%, or at least 99% as measured by edited target nucleobases in a population of cells.

[0619] In some embodiments, any of the ABE8 base editor variants described herein has higher on-target base editing efficiency compared to the ABE7 base editors. In some embodiments, any of the ABE8 base editor variants described herein have at least 1%, at least 2%, at least 3%, at least 4%, at least 5%, at least 10%, at least 15%, at least 20%, at least 25%, at least 30%, at least 35%, at least 40%, at least 45%, at least 50%, at least 55%, at least 60%, at least 65%, at least 70%, at least 75%, at least 80%, at least 85%, at least 90%, at least 95%, at least 99%, at least 100%, at least 105%, at least 110%, at least 115%, at least 120%, at least 125%, at least 130%, at least 135%, at least 140%, at least 145%, at least 150%, at least 155%, at least 160%, at least 165%, at least 170%, at least 175%, at least 180%, at least 185%, at least 190%, at least 195%, at least 200%, at least 210%, at least 220%, at least 230%, at least 240%, at least 250%, at least 260%, at least 270%, at least 280%, at least 290%, at least 300%, at least 310%, at least 320%, at least 330%, at least 340%, at least 350%, at least 360%, at least 370%, at least 380%, at least 390%, at least 400%, at least 450%, or at least 500% higher on-target base editing efficiency compared to an ABE7 base editor, e.g., ABE7.10.

[0620] In some embodiments, any of the ABE8 base editor variants described herein has at least 1.1 fold, at least 1.2 fold, at least 1.3 fold, at least 1.4 fold, at least 1.5 fold, at least 1.6 fold, at least 1.7 fold, at least 1.8 fold, at least 1.9 fold, at least 2.0 fold, at least 2.1 fold, at least 2.2 fold, at least 2.3 fold, at least 2.4 fold, at least 2.5 fold, at least 2.6 fold, at least 2.7 fold, at least 2.8 fold, at least 2.9 fold, at least 3.0 fold, at least 3.1 fold, at least 3.2 fold, at least 3.3 fold, at least 3.4 fold, at least 3.5 fold, at least 3.6 fold, at least 3.7 fold, at least 3.8 fold, at least 3.9 fold, at least 4.0 fold, at least 4.1 fold, at least 4.2 fold, at least 4.3 fold, at least 4.4 fold, at least 4.5 fold, at least 4.6 fold, at least 4.7 fold, at least 4.8 fold, at least 4.9 fold, or at least 5.0 fold higher on-target base editing efficiency compared to an ABE7 base editor, e.g., ABE7.10.

[0621] The ABE8 base editor variants described herein may be delivered to a host cell via a plasmid, a vector, a LNP complex, or an mRNA. In some embodiments, any of the ABE8 base editor variants described herein is delivered to a host cell as an mRNA. In some embodiments, an ABE8 base editor delivered via a nucleic acid based delivery system, e.g., an mRNA, has on-target editing efficiency of at least at least 1%, at least 2%, at least 3%, at least 4%, at least 5%, at least 10%, at least 15%, at least 20%, at least 25%, at least 30%, at least 35%, at least 40%, at least 45%, at least 50%, at least 55%, at least 60%, at least 65%, at least 70%, at least 75%, at least 80%, at least 85%, at least 90%, at least 95%, or at least 99% as measured by edited nucleobases. In some embodiments, an ABE8 base editor delivered by an mRNA system has higher base editing efficiency compared to an ABE8 base editor delivered by a plasmid or vector system. In some embodiments, any of the ABE8 base editor variants described herein has at least 1%, at least 2%, at least 3%, at least 4%, at least 5%, at least 10%, at least 15%, at least 20%, at least 25%, at least 30%, at least 35%, at least 40%, at least 45%, at least 50%, at least 55%, at least 60%, at least 65%, at least 70%, at least 75%, at least 80%, at least 85%, at least 90%, at least 95%, at least 99%, at least 100%, at least 105%, at least 110%, at least 115%, at least 120%, at least 125%, at least 130%, at least 135%, at least 140%, at least 145%, at least 150%, at least 155%, at least 160%, at least 165%, at least 170%, at least 175%, at least 180%, at least 185%, at least 190%, at least 195%, at least 200%, at least 210%, at least 220%, at least 230%, at least 240%, at least 250%, at least 260%, at least 270%, at least 280%, at least 290%, at least 300% higher, at least 310%, at least 320%, at least 330%, at least 340%, at least 350%, at least 360%, at least 370%, at least 380%, at least 390%, at least 400%, at least 450%, or at least 500% on-target editing efficiency when delivered by an mRNA system compared to when delivered by a plasmid or vector system. In some embodiments, any of the ABE8 base editor variants described herein has at least 1.1 fold, at least 1.2 fold, at least 1.3 fold, at least 1.4 fold, at least 1.5 fold, at least 1.6 fold, at least 1.7 fold, at least 1.8 fold, at least 1.9 fold, at least 2.0 fold, at least 2.1 fold, at least 2.2 fold, at least 2.3 fold, at least 2.4 fold, at least 2.5 fold, at least 2.6 fold, at least 2.7 fold, at least 2.8 fold, at least 2.9 fold, at least 3.0 fold, at least 3.1 fold, at least 3.2 fold, at least 3.3 fold, at least 3.4 fold, at least 3.5 fold, at least 3.6 fold, at least 3.7 fold, at least 3.8 fold, at least 3.9 fold, at least 4.0 fold, at least 4.1 fold, at least 4.2 fold, at least 4.3 fold, at least 4.4 fold, at least 4.5 fold, at least 4.6 fold, at least 4.7 fold, at least 4.8 fold, at least 4.9 fold, or at least 5.0 fold higher on-target editing efficiency when delivered by an mRNA system compared to when delivered by a plasmid or vector system.

[0622] In some embodiments, any of base editor systems comprising one of the ABE8 base editor variants described herein result in less than 50%, less than 40%, less than 30%, less than 20%, less than 19%, less than 18%, less than 17%, less than 16%, less than 15%, less than 14%, less than 13%, less than 12%, less than 11%, less than 10%, less than 9%, less than 8%, less than 7%, less than 6%, less than 5%, less than 4%, less than 3%, less than 2%, less than 1%, less than 0.9%, less than 0.8%, less than 0.7%, less than 0.6%, less than 0.5%, less than 0.4%, less than 0.3%, less than 0.2%, less than 0.1%, less than 0.09%, less than 0.08%, less than 0.07%, less than 0.06%, less than 0.05%, less than 0.04%, less than 0.03%, less than 0.02%, or less than 0.01% off-target editing in the target polynucleotide sequence.

[0623] In some embodiments, any of the ABE8 base editor variants described herein has lower guided off-target editing efficiency when delivered by an mRNA system compared to when delivered by a plasmid or vector system. In some embodiments, any of the ABE8 base editor variants described herein has at least 1%, at least 2%, at least 3%, at least 4%, at least 5%, at least 10%, at least 15%, at least 20%, at least 25%, at least 30%, at least 35%, at least 40%, at least 45%, at least 50%, at least 55%, at least 60%, at least 65%, at least 70%, at least 75%, at least 80%, at least 85%, at least 90%, at least 95%, or at least 99% lower guided off-target editing efficiency when delivered by an mRNA system compared to when delivered by a plasmid or vector system. In some embodiments, any of the ABE8 base editor variants described herein has at least 1.1 fold, at least 1.2 fold, at least 1.3 fold, at least 1.4 fold, at least 1.5 fold, at least 1.6 fold, at least 1.7 fold, at least 1.8 fold, at least 1.9 fold, at least 2.0 fold, at least 2.1 fold, at least 2.2 fold, at least 2.3 fold, at least 2.4 fold, at least 2.5 fold, at least 2.6 fold, at least 2.7 fold, at least 2.8 fold, at least 2.9 fold, or at least 3.0 fold lower guided off-target editing efficiency when delivered by an mRNA system compared to when delivered by a plasmid or vector system. In some embodiments, any of the ABE8 base editor variants described herein has at least about 2.2 fold decrease in guided off-target editing efficiency when delivered by an mRNA system compared to when delivered by a plasmid or vector system.

[0624] In some embodiments, any of the ABE8 base editor variants described herein has lower guide-independent off-target editing efficiency when delivered by an mRNA system compared to when delivered by a plasmid or vector system. In some embodiments, any of the ABE8 base editor variants described herein has at least 1%, at least 2%, at least 3%, at least 4%, at least 5%, at least 10%, at least 15%, at least 20%, at least 25%, at least 30%, at least 35%, at least 40%, at least 45%, at least 50%, at least 55%, at least 60%, at least 65%, at least 70%, at least 75%, at least 80%, at least 85%, at least 90%, at least 95%, or at least 99% lower guide-independent off-target editing efficiency when delivered by an mRNA system compared to when delivered by a plasmid or vector system. In some embodiments, any of the ABE8 base editor variants described herein has at least 1.1 fold, at least 1.2 fold, at least 1.3 fold, at least 1.4 fold, at least 1.5 fold, at least 1.6 fold, at least 1.7 fold, at least 1.8 fold, at least 1.9 fold, at least 2.0 fold, at least 2.1 fold, at least 2.2 fold, at least 2.3 fold, at least 2.4 fold, at least 2.5 fold, at least 2.6 fold, at least 2.7 fold, at least 2.8 fold, at least 2.9 fold, at least 3.0 fold, at least 5.0 fold, at least 10.0 fold, at least 20.0 fold, at least 50.0 fold, at least 70.0 fold, at least 100.0 fold, at least 120.0 fold, at least 130.0 fold, or at least 150.0 fold lower guide-independent off-target editing efficiency when delivered by an mRNA system compared to when delivered by a plasmid or vector system. In some embodiments, ABE8 base editor variants described herein has 134.0 fold decrease in guide-independent off-target editing efficiency (e.g., spurious RNA deamination) when delivered by an mRNA system compared to when delivered by a plasmid or vector system. In some embodiments, ABE8 base editor variants described herein does not increase guide-independent mutation rates across the genome.

[0625] In some embodiments, a single gene delivery event (e.g., by transduction, transfection, electroporation or any other method) can be used to target base editing of 5 sequences within a cell's genome. In some embodiments, a single gene delivery event can be used to target base editing of 6 sequences within a cell's genome. In some embodiments, a single gene delivery event can be used to target base editing of 7 sequences within a cell's genome. In some embodiments, a single electroporation event can be used to target base editing of 8 sequences within a cell's genome. In some embodiments, a single gene delivery event can be used to target base editing of 9 sequences within a cell's genome. In some embodiments, a single gene delivery event can be used to target base editing of 10 sequences within a cell's genome. In some embodiments, a single gene delivery event can be used to target base editing of 20 sequences within a cell's genome. In some embodiments, a single gene delivery event can be used to target base editing of 30 sequences within a cell's genome. In some embodiments, a single gene delivery event can be used to target base editing of 40 sequences within a cell's genome. In some embodiments, a single gene delivery event can be used to target base editing of 50 sequences within a cell's genome.

[0626] In some embodiments, the method described herein, for example, the base editing methods has minimum to no off-target effects.

[0627] In some embodiments, the base editing method described herein results in at least 50% of a cell population that have been successfully edited (i.e., cells that have been successfully engineered). In some embodiments, the base editing method described herein results in at least 55% of a cell population that have been successfully edited. In some embodiments, the base editing method described herein results in at least 60% of a cell population that have been successfully edited. In some embodiments, the base editing method described herein results in at least 65% of a cell population that have been successfully edited. In some embodiments, the base editing method described herein results in at least 70% of a cell population that have been successfully edited. In some embodiments, the base editing method described herein results in at least 75% of a cell population that have been successfully edited. In some embodiments, the base editing method described herein results in at least 80% of a cell population that have been successfully edited. In some embodiments, the base editing method described herein results in at least 85% of a cell population that have been successfully edited. In some embodiments, the base editing method described herein results in at least 90% of a cell population that have been successfully edited. In some embodiments, the base editing method described herein results in at least 95% of a cell population that have been successfully edited. In some embodiments, the base editing method described herein results in about 91%, 92%, 93%, 94%, 95%, 96%, 97%, 98%, 99% or 100% of a cell population that have been successfully edited.

[0628] In some embodiments, the live cell recovery following a base editing intervention is greater than at least 60%, 70%, 80%, 90% of the starting cell population at the time of the base editing event. In some embodiments, the live cell recovery as described above is about 70%. In some embodiments, the live cell recovery as described above is about 75%. In some embodiments, the live cell recovery as described above is about 80%. In some embodiments, the live cell recovery as described above is about 85%. In some embodiments, the live cell recovery as described above is about 90%, or about 91%, 92%, 93%, 94% 95%, 96%, 97%, 98%, or 99%, or 100% of the cells in the population at the time of the base editing event.

[0629] In some embodiments the engineered cell population can be further expanded in vitro by about 2 fold, about 3-fold, about 4-fold, about 5-fold, about 6-fold, about 7-fold, about 8-fold, about 9-fold, about 10-fold, about 15-fold, about 20-fold, about 25-fold, about 30-fold, about 35-fold, about 40-fold, about 45-fold, about 50-fold, or about 100-fold.

[0630] The number of intended mutations and indels can be determined using any suitable method, for example, as described in International PCT Application Nos. PCT/2017/045381 (WO2018/027078) and PCT/US2016/058344 (WO2017/070632); Komor, A. C., et al., “Programmable editing of a target base in genomic DNA without double-stranded DNA cleavage” Nature 533, 420-424 (2016); Gaudelli, N. M., et al., “Programmable base editing of A•T to G•C in genomic DNA without DNA cleavage” Nature 551, 464-471 (2017); and Komor, A. C., et al., “Improved base excision repair inhibition and bacteriophage Mu Gam protein yields C:G-to-T:A base editors with higher efficiency and product purity” Science Advances 3:eaao4774 (2017); the entire contents of which are hereby incorporated by reference.

[0631] In some embodiments, to calculate indel frequencies, sequencing reads are scanned for exact matches to two 10-bp sequences that flank both sides of a window in which indels can occur. If no exact matches are located, the read is excluded from analysis. If the length of this indel window exactly matches the reference sequence the read is classified as not containing an indel. If the indel window is two or more bases longer or shorter than the reference sequence, then the sequencing read is classified as an insertion or deletion, respectively. In some embodiments, the base editors provided herein can limit formation of indels in a region of a nucleic acid. In some embodiments, the region is at a nucleotide targeted by a base editor or a region within 2, 3, 4, 5, 6, 7, 8, 9, or 10 nucleotides of a nucleotide targeted by a base editor.

[0632] The number of indels formed at a target nucleotide region can depend on the amount of time a nucleic acid (e.g., a nucleic acid within the genome of a cell) is exposed to a base editor. In some embodiments, the number or proportion of indels is determined after at least 1 hour, at least 2 hours, at least 6 hours, at least 12 hours, at least 24 hours, at least 36 hours, at least 48 hours, at least 3 days, at least 4 days, at least 5 days, at least 7 days, at least 10 days, or at least 14 days of exposing the target nucleotide sequence (e.g., a nucleic acid within the genome of a cell) to a base editor. It should be appreciated that the characteristics of the base editors as described herein can be applied to any of the fusion proteins, or methods of using the fusion proteins provided herein.

[0633] Details of base editor efficiency are described in International PCT Application Nos. PCT/2017/045381 (WO 2018/027078) and PCT/US2016/058344 (WO 2017/070632), each of which is incorporated herein by reference for its entirety. Also see Komor, A. C., et al., “Programmable editing of a target base in genomic DNA without double-stranded DNA cleavage” Nature 533, 420-424 (2016); Gaudelli, N. M., et al., “Programmable base editing of A•T to G•C in genomic DNA without DNA cleavage” Nature 551, 464-471 (2017); and Komor, A. C., et al., “Improved base excision repair inhibition and bacteriophage Mu Gam protein yields C:G-to-T:A base editors with higher efficiency and product purity” Science Advances 3:eaao4774 (2017), the entire contents of which are hereby incorporated by reference. In some embodiments, editing of a plurality of nucleobase pairs in one or more genes using the methods provided herein results in formation of at least one intended mutation. In some embodiments, said formation of said at least one intended mutation results in the disruption the normal function of a gene. In some embodiments, said formation of said at least one intended mutation results decreases or eliminates the expression of a protein encoded by a gene. It should be appreciated that multiplex editing can be accomplished using any method or combination of methods provided herein.

### Engineered Nucleases

[0634] In some embodiments, the nucleic acid editing system comprises an engineered nuclease (e.g., meganuclease, zinc finger nuclease (ZFN), Transcription activator-like effector nuclease (TALEN), or a Cas nuclease. In some embodiments, the nucleic acid editing system comprises a ZFN. ZFNs are fusion proteins comprising a zinc-finger DNA binding domain (“ZF”) and a nuclease domain. Each naturally-occurring ZF may bind to three consecutive base pairs (a DNA triplet), and ZF repeats are combined to recognize a DNA target sequence and provide sufficient affinity. Thus, engineered ZF repeats are combined to recognize longer DNA sequences, such as, e.g., 9 base pairs, 12 base pairs, 15 base pairs, 18 base pairs, etc. In some embodiments, the ZFN comprise ZFs fused to a nuclease domain from a restriction endonuclease (e.g., FokI). In some embodiments, the nuclease domain comprises a dimerization domain, such as when the nuclease dimerizes to be active, and a pair of ZFNs comprising the ZF repeats and the nuclease domain is designed for targeting a target sequence, which comprises two half target sequences recognized by each ZF repeats on opposite strands of the DNA molecule, with an interconnecting sequence in between (which is sometimes called a spacer in the literature). For example, the interconnecting sequence is 5 to 7 basepairs in length. When both ZFNs of the pair bind, the nuclease domain may dimerize and introduce a DSB within the interconnecting sequence. In some embodiments, the dimerization domain of the nuclease domain comprises a knob-into-hole motif to promote dimerization.

[0635] In some embodiments, the nucleic acid editing system comprises a TALEN. The DNA binding domain of TALENs usually comprises a variable number of 34 or 35 amino acid repeats (“modules” or “TAL modules”), with each module binding to a single DNA base pair, A, T, G, or C. Adjacent residues at positions 12 and 13 (the “repeat-variable di-residue” or RVD) of each module specify the single DNA base pair that the module binds to. In some embodiments, the TALEN may comprise a nuclease domain from a restriction endonuclease (e.g., FokI). In some embodiments, the nuclease domain may dimerize to be active, and a pair of TALENS is designed for targeting a target sequence, which comprises two half target sequences recognized by each DNA binding domain on opposite strands of the DNA molecule, with an interconnecting sequence in between. For example, each half target sequence is in the range of 10 to 20 base pairs, and the interconnecting sequence is 12 to 19 base pairs in length. When both TALENs of the pair bind, the nuclease domain may dimerize and introduce a double strand break within the interconnecting sequence. In some embodiments, the dimerization domain of the nuclease domain may comprise a knob-into-hole motif to promote dimerization.

[0636] In some embodiments, the nucleic acid editing system comprises a meganuclease. Naturally-occurring meganucleases recognize and cleave double-stranded DNA sequences of about 12 to 40 base pairs and are commonly grouped into five families. In some embodiments, the meganuclease is chosen from the LAGLIDADG (SEQ ID NO: 4013) family, the GIY-YIG family, the HNH family, the His-Cys box family, and the PD-(D/E)XK family. In some embodiments, the DNA binding domain of the meganuclease is engineered to recognize and bind to a sequence other than its cognate target sequence. In some embodiments, the DNA binding domain of the meganuclease is fused to a heterologous nuclease domain. In some embodiments, the meganuclease, such as a homing endonuclease, are fused to TAL modules to create a hybrid protein, such as a “megaTAL” protein. The megaTAL proteins can have improved DNA targeting specificity by recognizing the target sequences of both the DNA binding domain of the meganuclease and the TAL modules.

### F. Pharmaceutical Compositions and Formulations

[0637] Provided herein are compositions (e.g., pharmaceutical compositions) comprising any of the recombinant lyssavirus genomes (e.g., rabies virus genomes) and recombinant lyssaviruses (e.g., rabies viruses) described herein. The term “pharmaceutical composition,” as used herein, refers to a composition formulated for pharmaceutical use. In certain embodiments, the pharmaceutical composition further comprises a pharmaceutically acceptable carrier. In certain embodiments, the pharmaceutical composition comprises additional agents (e.g., for specific delivery, increasing half-life, or other therapeutic compounds).

[0638] As used herein, the term “pharmaceutically-acceptable carrier” refers to a pharmaceutically-acceptable material, composition, or vehicle, such as a liquid or solid filler, diluent, excipient, manufacturing aid (e.g., lubricant, talc magnesium, calcium or zinc stearate, or steric acid), or solvent encapsulating material, involved in carrying or transporting the compound (e.g., a recombinant lyssavirus genome or recombinant lyssavirus described herein) from one site (e.g., the delivery site) of the body, to another site (e.g., a target organ, tissue, or portion of the body). A pharmaceutically acceptable carrier is “acceptable” in the sense of being compatible with the other ingredients of the formulation and not injurious to the tissue of the subject (e.g., physiologically compatible, sterile, physiologic pH, etc.).

[0639] Some nonlimiting examples of materials which can serve as pharmaceutically-acceptable carriers include: (1) sugars, such as lactose, glucose and sucrose; (2) starches, such as com starch and potato starch; (3) cellulose, and its derivatives, such as sodium carboxymethyl cellulose, methylcellulose, ethyl cellulose, microcrystalline cellulose and cellulose acetate; (4) powdered tragacanth; (5) malt; (6) gelatin; (7) lubricating agents, such as magnesium stearate, sodium lauryl sulfate and talc; (8) excipients, such as cocoa butter and suppository waxes; (9) oils, such as peanut oil, cottonseed oil, safflower oil, sesame oil, olive oil, com oil and soybean oil; (10) glycols, such as propylene glycol; (11) polyols, such as glycerin, sorbitol, mannitol and polyethylene glycol (PEG); (12) esters, such as ethyl oleate and ethyl laurate; (13) agar; (14) buffering agents, such as magnesium hydroxide and aluminum hydroxide; (15) alginic acid; (16) pyrogen-free water; (17) isotonic saline; (18) Ringer's solution; (19) ethyl alcohol; (20) pH buffered solutions; (21) polyesters, polycarbonates and/or polyanhydrides; (22) bulking agents, such as polypeptides and amino acids (23) serum alcohols, such as ethanol; and (23) other non-toxic compatible substances employed in pharmaceutical formulations. Wetting agents, coloring agents, release agents, coating agents, sweetening agents, flavoring agents, perfuming agents, preservative and antioxidants can also be present in the formulation. The terms such as “excipient,” “carrier,” “pharmaceutically acceptable carrier,” “vehicle,” or the like are used interchangeably herein.

[0640] Pharmaceutical compositions can comprise one or more pH buffering compounds to maintain the pH of the formulation at a predetermined level that reflects physiological pH, such as in the range of about 5.0 to about 8.0. The pH buffering compound used in the aqueous liquid formulation can be an amino acid, such as histidine, or a mixture of amino acids, such as histidine and glycine. Alternatively, the pH buffering compound is preferably an agent which maintains the pH of the formulation at a predetermined level, such as in the range of about 5.0 to about 8.0, and which does not chelate calcium ions. Illustrative examples of such pH buffering compounds include, but are not limited to, imidazole and acetate ions. The pH buffering compound may be present in any amount suitable to maintain the pH of the formulation at a predetermined level.

[0641] Pharmaceutical compositions can also contain one or more osmotic modulating agents, i.e., a compound that modulates the osmotic properties (e.g., tonicity, osmolality, and/or osmotic pressure) of the formulation to a level that is acceptable to the blood stream and blood cells of recipient individuals. The osmotic modulating agent can be an agent that does not chelate calcium ions. The osmotic modulating agent can be any compound known or available to those skilled in the art that modulates the osmotic properties of the formulation. One skilled in the art may empirically determine the suitability of a given osmotic modulating agent for use in the inventive formulation. Illustrative examples of suitable types of osmotic modulating agents include, but are not limited to: salts, such as sodium chloride and sodium acetate; sugars, such as sucrose, dextrose, and mannitol; amino acids, such as glycine; and mixtures of one or more of these agents and/or types of agents. The osmotic modulating agent(s) may be present in any concentration sufficient to modulate the osmotic properties of the formulation.

[0642] In certain embodiments, the pharmaceutical composition is formulated for delivery to a subject, e.g., for gene therapy. Suitable routes of administrating the pharmaceutical composition described herein include, without limitation: topical, subcutaneous, transdermal, intradermal, intralesional, intraarticular, intraperitoneal, intravesical, transmucosal, gingival, intradental, intracochlear, transtympanic, intraorgan, epidural, intrathecal, intramuscular, intravenous, intravascular, intraosseus, periocular, intratumoral, intracerebral, and intracerebroventricular administration.

[0643] In certain embodiments, the pharmaceutical composition described herein is administered locally to a diseased site (e.g., tumor site). In certain embodiments, the pharmaceutical composition described herein is administered to a subject by injection, by means of a catheter, by means of a suppository, or by means of an implant, the implant being of a porous, non-porous, or gelatinous material, including a membrane, such as a silastic membrane, or a fiber.

[0644] In certain embodiments, the pharmaceutical composition described herein is delivered in a controlled release system. In certain embodiments, a pump can be used (see, e.g., Langer, 1990, Science 249: 1527-1533; Sefton, 1989, CRC Crit. Ref. Biomed. Eng. 14:201; Buchwald et al, 1980, Surgery 88:507; Saudek et al., 1989, N. Engl. J. Med. 321:574). In certain embodiments, polymeric materials can be used. See, e.g., Medical Applications of Controlled Release (Langer and Wise eds., CRC Press, Boca Raton, Fla., 1974); Controlled Drug Bioavailability, Drug Product Design and Performance (Smolen and Ball eds., Wiley, New York, 1984); Ranger and Peppas, 1983, Macromol. Sci. Rev. Macromol. Chem. 23:61. See, also, Levy et al, 1985, Science 228: 190; During et al, 1989, Ann. Neurol. 25:351; Howard et ah, 1989, J. Neurosurg. 71: 105. Other controlled release systems are discussed, for example, in Langer, supra.

[0645] In certain embodiments, the pharmaceutical composition is formulated in accordance with routine procedures as a composition adapted for intravenous or subcutaneous administration to a subject, e.g., a human. In certain embodiments, pharmaceutical compositions for administration by injection are solutions in sterile isotonic used as solubilizing agent and a local anesthetic such as lignocaine to ease pain at the site of the injection.

[0646] Generally, the ingredients are supplied either separately or mixed together in unit dosage form, for example, as a dry lyophilized powder or water free concentrate in a hermetically sealed container such as an ampoule or sachette indicating the quantity of active agent.

[0647] Where the pharmaceutical is to be administered by infusion, it can be dispensed with an infusion bottle containing sterile pharmaceutical grade water or saline. Where the pharmaceutical composition is administered by injection, an ampoule of sterile water for injection or saline can be provided so that the ingredients can be mixed prior to administration.

[0648] A pharmaceutical composition for systemic administration can be a liquid, e.g., sterile saline, lactated Ringer's or Hank's solution. In addition, the pharmaceutical composition can be in solid forms and re-dissolved or suspended immediately prior to use. Lyophilized forms are also contemplated. The pharmaceutical composition can be contained within a lipid particle or vesicle, such as a liposome or microcrystal, which is also suitable for parenteral administration. The particles can be of any suitable structure, such as unilamellar or plurilamellar, so long as compositions are contained therein. Compounds can be entrapped in “stabilized plasmid-lipid particles” (SPLP) containing the fusogenic lipid dioleoylphosphatidylethanolamine (DOPE), low levels (5-10 mol %) of cationic lipid, and stabilized by a polyethyleneglycol (PEG) coating (see, e.g., Zhang Y. P. et al., Gene Ther. 1999, 6: 1438-47). Positively charged lipids such as 1,2-dioleoyl-3-trimethylammonium-propane, or “DOTAP,” are particularly preferred for such particles and vesicles. The preparation of such lipid particles is well known. See, e.g., U.S. Pat. Nos. 4,880,635; 4,906,477; 4,911,928; 4,917,951; 4,920,016; and 4,921,757; each of which is incorporated herein by reference.

[0649] The pharmaceutical composition described herein can be administered or packaged as a unit dose. The term “unit dose” when used in reference to a pharmaceutical composition of the present disclosure refers to physically discrete units suitable as unitary dosage for the subject, each unit containing a predetermined quantity of active material calculated to produce the desired therapeutic effect in association with the required diluent; i.e., carrier, or vehicle.

[0650] Further, the pharmaceutical composition can be provided as a pharmaceutical kit comprising (a) a container containing a compound of the invention in lyophilized form and (b) a second container containing a pharmaceutically acceptable diluent (e.g., sterile, used for reconstitution or dilution of the lyophilized compound of the invention). Optionally associated with such containers) can be a notice in the form prescribed by a governmental agency regulating the manufacture, use or sale of pharmaceuticals or biological products, which notice reflects approval by the agency of manufacture, use or sale for human administration.

[0651] In another aspect, an article of manufacture containing materials useful for the treatment of the diseases described above is included. In certain embodiments, the article of manufacture comprises a container and a label. Suitable containers include, for example, bottles, vials, syringes, and test tubes. The containers can be formed from a variety of materials such as glass or plastic. In certain embodiments, the container holds a composition (e.g., a recombinant lyssavirus genome or a recombinant lyssavirus described herein) that is effective for treating a disease and can have a sterile access port. For example, the container can be an intravenous solution bag or a vial having a stopper pierceable by a hypodermic injection needle. The active agent in the composition is a compound (e.g., a recombinant lyssavirus genome or a recombinant lyssavirus) of the disclosure. In certain embodiments, the label on or associated with the container indicates that the composition is used for treating the disease of choice. The article of manufacture can further comprise a second container comprising a pharmaceutically-acceptable buffer, such as phosphate-buffered saline, Ringer's solution, or dextrose solution. It can further include other materials desirable from a commercial and user standpoint, including other buffers, diluents, filters, needles, syringes, and package inserts with instructions for use.

[0652] In some embodiments, any of the recombinant lyssavirus genomes (e.g., rabies virus genomes) or recombinant lyssaviruses (e.g., rabies viruses) described herein are provided as part of a pharmaceutical composition. In some embodiments, the pharmaceutical composition comprises any of the recombinant lyssavirus genomes or recombinant lyssaviruses described herein. In some embodiments, the pharmaceutical composition comprises any of the complexes provided herein.

[0653] In some embodiments, compositions provided herein are administered to a subject, for example, to a human subject, in order to affect a targeted genomic modification within the subject. In some embodiments, cells are obtained from the subject and contacted with any of the pharmaceutical compositions provided herein. In some embodiments, cells removed from a subject and contacted ex vivo with a pharmaceutical composition are re-introduced into the subject, optionally after the desired genomic modification has been affected or detected in the cells. Methods of delivering pharmaceutical compositions comprising nucleases are known, and are described, for example, in U.S. Pat. Nos. 6,453,242; 6,503,717; 6,534,261; 6,599,692; 6,607,882; 6,689,558; 6,824,978; 6,933,113; 6,979,539; 7,013,219; and 7,163,824, the disclosures of all of which are incorporated by reference herein in their entireties. Although the descriptions of pharmaceutical compositions provided herein are principally directed to pharmaceutical compositions which are suitable for administration to humans, it will be understood by the skilled artisan that such compositions are generally suitable for administration to animals or organisms of all sorts. Modification of pharmaceutical compositions suitable for administration to humans in order to render the compositions suitable for administration to various animals is well understood, and the ordinarily skilled veterinary pharmacologist can design and/or perform such modification with merely ordinary, if any, experimentation. Subjects to which administration of the pharmaceutical compositions is contemplated include, but are not limited to, humans and/or other primates; mammals, domesticated animals, pets, and commercially relevant mammals such as cattle, pigs, horses, sheep, cats, dogs, mice, and/or rats; and/or birds, including commercially relevant birds such as chickens, ducks, geese, and/or turkeys.

[0654] Formulations of the pharmaceutical compositions described herein may be prepared by any method known or hereafter developed in the art of pharmacology. In general, such preparatory methods include the step of bringing the active ingredient(s) into association with an excipient and/or one or more other accessory ingredients, and then, if necessary and/or desirable, shaping and/or packaging the product into a desired single- or multi-dose unit.

[0655] Pharmaceutical formulations may additionally comprise a pharmaceutically acceptable excipient, which, as used herein, includes any and all solvents, dispersion media, diluents, or other liquid vehicles, dispersion or suspension aids, surface active agents, isotonic agents, thickening or emulsifying agents, preservatives, solid binders, lubricants and the like, as suited to the particular dosage form desired. Remington's The Science and Practice of Pharmacy, 21st Edition, A. R. Gennaro (Lippincott, Williams & Wilkins, Baltimore, Md., 2006; incorporated in its entirety herein by reference) discloses various excipients used in formulating pharmaceutical compositions and known techniques for the preparation thereof. See also PCT application PCT/US2010/055131 (Publication number WO2011053982 A8, filed Nov. 2, 2010), incorporated in its entirety herein by reference, for additional suitable methods, reagents, excipients and solvents for producing pharmaceutical compositions comprising a nuclease. Except insofar as any conventional excipient medium is incompatible with a substance or its derivatives, such as by producing any undesirable biological effect or otherwise interacting in a deleterious manner with any other component(s) of the pharmaceutical composition, its use is contemplated to be within the scope of this disclosure. In certain embodiments, compositions in accordance with the present invention may be used for treatment of any of a variety of diseases, disorders, and/or conditions.

[0656] Various aspects of the present disclosure employs, unless otherwise indicated, conventional techniques of molecular biology (including recombinant techniques), microbiology, cell biology, biochemistry, and immunology, which are well within the purview of the skilled artisan. Such techniques are explained fully in the literature, such as, “Molecular Cloning: A Laboratory Manual”, second edition (Sambrook, 1989); “Oligonucleotide Synthesis” (Gait, 1984); “Animal Cell Culture” (Freshney, 1987); “Methods in Enzymology,” and “Handbook of Experimental Immunology” (Weir, 1996); “Gene Transfer Vectors for Mammalian Cells” (Miller and Calos, 1987); “Current Protocols in Molecular Biology” (Ausubel, 1987); “PCR: The Polymerase Chain Reaction”, (Mullis, 1994); “Current Protocols in Immunology” (Coligan, 1991). These techniques are applicable to the production of the various aspects of the present disclosure, and, as such, may be considered in making and practicing the same.

### G. Polynucleotides, Vectors, and Cells

[0657] Provided herein are polynucleotides comprising: (i) a recombinant lyssavirus (e.g., rabies virus) genome described herein; (ii) an N gene encoding for a lyssavirus (e.g., rabies virus) nucleoprotein or a functional variant thereof; (iii) a P gene encoding for a lyssavirus (e.g., rabies virus) phosphoprotein or a functional variant thereof; (iv) an L gene encoding for a lyssavirus (e.g., rabies virus) polymerase (e.g., a RNA-dependent RNA polymerase) or a functional variant thereof; (v) a G gene encoding for a heterologous envelope protein or a functional variant thereof; and/or (vi) an M gene encoding for a lyssavirus (e.g., rabies virus) matrix protein or a functional variant thereof.

[0658] In certain embodiments, the recombinant lyssavirus genome (e.g., rabies virus genome) lacks a G gene encoding for a envelope protein or a functional variant thereof, and/or the genome lacks an L gene encoding for a polymerase or a functional variant thereof.

[0659] In certain embodiments, the recombinant lyssavirus genome (e.g., rabies virus genome) lacks a G gene encoding for a envelope protein or a functional variant thereof.

[0660] In certain embodiments, the recombinant lyssavirus genome (e.g., rabies virus genome) comprises:

[0661] an N gene encoding for a nucleoprotein or a functional variant thereof;

[0662] a P gene encoding for a phosphoprotein or a functional variant thereof; and

[0663] an M gene encoding for a matrix protein or a functional variant thereof.

[0664] The polynucleotides described herein can be obtained by any method known in the art, such as by chemically synthesizing the DNA chain, by PCR, or by the Gibson Assembly method. The advantage of constructing a full-length DNA by chemical synthesis or a combination of PCR method or Gibson Assembly method is that the codons may be optimized to ensure that the fusion protein is expressed at a high level in a host cell. Optimized codons may be selected using the genetic code use frequency database (http://www.kazusa.or.jp/codon/index.html), which is disclosed in the home page of Kazusa DNA Research Institute. In certain embodiments, the polynucleotide is codon optimized. In certain embodiments, the polynucleotide can be optimized by RNA optimization. Additional optimization methods can be included to increase stability for recombinant expression, including, e.g., replacement of signal sequences with exogenous signal sequences, removal of instability elements, removal of inhibitory regions, removal of potential splice sites, and other optimization methods known to those of ordinary skill in the art. See, e.g., U.S. Pat. No. 6,794,498, the disclosure of which is herein incorporated by reference in its entirety.

[0665] Once obtained, polynucleotides of the present disclosure may be incorporated into suitable expression vectors. Accordingly, the present disclosure also provides a vector comprising any of the polynucleotides disclosed herein, separately, or in combination. Suitable vectors include plasmids, viruses, artificial chromosomes, bacmids, cosmids, and others known to those of ordinary skill in the art. In certain embodiments, the vector is an expression vector.

[0666] Suitable expression vectors include Escherichia coli-derived plasmids (e.g., pBR322, pBR325, pUC12, pUC13); Bacillus subtilis-derived plasmids (e.g., pUB110, pTP5, pC194); yeast-derived plasmids (e.g., pSH19, pSH15); plasmids suitable for expression in insect cells (e.g., pFast-Bac); plasmids suitable for expression in mammalian cells (e.g., pXTI, pRc/CMV, pRc/RSV, pcDNA1/Neo); also bacteriophages, such as lamda phage and the like; other vectors that may be used include insect viral vectors, such as baculovirus and the like (e.g., BmNPV, AcNPV); and viral vectors suitable for expression in a mammalian cell, such as retrovirus, vaccinia virus, adenovirus and the like.

[0667] The genes and/or transgenes comprises with the polynucleotides and vectors are typically expressed under the control of a transcriptional regulatory element. In certain embodiments, the transcriptional regulatory element can comprise one or more enhancer elements, intron elements, and/or promoter elements. In certain embodiments, the transcriptional regulatory element comprises a constitutive promoter. Examples of transcriptional regulatory elements include those that comprise a CMV promoter (promoter from human cytomegalovirus) optionally including a CMV enhancer, a EF1α promoter (promoter from human elongation factor 1 alpha), a CBA promoter (comprising a CMV early enhancer and a chicken p-actin promoter), a CAG promoter (comprising a CBA promoter and a rabbit p-globin intron), a CAGGS promoter (comprising a CMV enhancer, a CBA promoter, and chicken p-actin intron 1/exon 1), a PGK promoter (promoter from phosphoglycerate kinase), a U6 promoter (U6 nuclear promoter), a Ubc promoter (promoter from human ubiquitin C), a CASI promoter (comprising a CMV enhancer, a ubiquitin C enhancer, and a chicken p-actin promoter), and a CALM1 promoter (promoter from calmodulin 1). Various constitutive transcriptional regulatory elements are known to those of ordinary skill in the art.

[0668] In certain embodiments, the transcriptional regulatory element comprises an inducible promoter. For example, the transcripitional regulatory element can comprise the inducible TRE promoter (tetracyclin response element promoter). Such inducible promoters can be positive inducible, where the promoter is inactive because an activator protein cannot bind thereto, or negative inducible, wherein a repressor protein is bound thereto that prevents transcription. Examples of inducible promoters include those that are chemically inducible, e.g., a tetracycline ON (Tet-On) promoter system, a lac repressor system, a pBad prokaryotic promoter, and others such as alcohol or steroid regulated promoters. Inducible promoters can be temperature inducible, e.g., heat or cold induced promoters (e.g., Hsp70 or Hsp90-derived promoters), and light inducible, where light can be used to regulate transcription. In certain embodiments, the transcriptional regulatory element comprises a repressible promoter. Various inducible transcriptional regulatory elements are known to those of ordinary skill in the art.

[0669] In certain embodiments, the transcriptional regulatory element comprises an promoter exogenous to the gene or transgene. In certain embodiments, the transcriptional regulatory element comprises a synthetic promoter.

[0670] Suitable promoters may be chosen based on its use for expression in a desired host cell. For example, when the host is an animal cell, any one of the following promoters are used: SR-alpha promoter, SV40 promoter, LTR promoter, CMV (cytomegalovirus) promoter, RSV (Rous sarcoma virus) promoter, MoMuLV (Moloney mouse leukemia virus) LTR, HSV-TK (simple herpes virus thymidine kinase) promoter and the like are used. In certain embodiments, the promoter is CMV promoter or SR alpha promoter. In certain embodiments, the promoter is an elongation factor 1-alpha (EF1a) promoter. When the host cell is Escherichia coli, any of the following promoters may be used: trp promoter, lac promoter, recA promoter, lambdaPL promoter, lpp promoter, T7 promoter and the like. When the host is genus Bacillus, any of the following promoters may be used: SPO1 promoter, SPO2 promoter, penP promoter and the like. When the host is a yeast, any of the following promoters may be used: Gall/10 promoter, PHO5 promoter, PGK promoter, GAP promoter, ADH promoter and the like. When the host is an insect cell, any of the following promoters may be used: polyhedrin promoter, P10 promoter and the like. When the host is a plant cell, any of the following promoters may be used: CaMV35S promoter, CaMVI9S promoter, NOS promoter and the like.

[0671] If desired, the expression vector also includes any one or more of an enhancer, splicing signal, terminator, polyadenylation signal, a selection marker (e.g., a drug resistance gene, auxotrophic complementary gene and the like), or a replication origin.

[0672] The polynucleotides of the present disclosure may be introduced into virtually any host cell of interest, including but not limited to bacteria, yeast, fungi, insects, plants, and animal cells using routine methods known to the skilled artisan.

[0673] The genus Escherichia includes Escherichia coli K12/DH1, Escherichia coli JM103, Escherichia coli JA221, Escherichia coli HB101, Escherichia coli C600 and the like. The genus Bacillus includes Bacillus subtilis MI 114, Bacillus subtilis 207-21, and the like.

[0674] Yeast useful for hosting the polynucleotides of the disclosure include Saccharomyces cerevisiae AH22, AH22 R-, NA87-11A, DKD-5D, 20B-12, Schizosaccharomyces pombe NCYC1913, NCYC2036, Pichia pastoris KM71, and the like.

[0675] Polynucleotides of the present disclosure may be introduced into insect cells using, for example, viral vectors, such as AcNPV. Insect host cells include any of the following cell lines: cabbage armyworm larva-derived established line (Spodoptera frugiperda cell; Sf cell), MG1 cells derived from the mid-intestine of Trichoplusiani, High Five, cells derived from an egg of Trichoplusiani, Mamestra brassicae-derived cells, Estigmena acraz-derived cells, and the like. When the virus is BmNPV, cells of a Bombyx mori-derived line (Bombyx mori N cell; BmN cell) and the like are used. Sf cells include, for example, Sf9 cells (ATCC CRL1711), Sf21s cells, and the like.

[0676] Mammalian cell lines may be used, including, without limitation monkey COS-7 cells, monkey Vero cells, Chinese hamster ovary (CHO) cells, dhfr gene-deficient CHO cells, mouse L cells, mouse AtT-20 cells, mouse myeloma cells, rat GH3 cells, human FL cells, human embryonic kidney (HEK) cells (e.g., HEK293, HEK293T), COS cells (e.g., COS1 or COS), BHK cells, MDCK cells, NSO cells, PER.C6 cells, CRL7030 cells, HsS78Bst cells, HeLa cells, NIH 3T3 cells, HepG2 cells, SP210 cells, R1.1 cells, B-W cells, L-M cells, BSC1 cells, BSC40 cells, YB/20 cells and BMT10 cells, and the like.

[0677] In certain embodiments, suitable cells are of a mammalian, a bacterial, or an insect origin. In certain embodiments, the cell is selected from the group consisting of a HEK293 cell, a HEK293T cells, a VERO cell, a BHK cell, and a BSR cell.

[0678] All the above-mentioned host cells may be haploid (monoploid), or polyploid (e.g., diploid, triploid, tetraploid and the like.

[0679] Various methods of introducing polynucleotides of the disclosure into a host cell described herein are known to those of ordinary skill in the art. For example, such methods may include the use of any transfection method known in the art (e.g., using lysozyme, PEG, CaCl2 coprecipitation, electroporation, microinjection, particle gun, lipofection, Agrobacterium and the like). The transfection method is selected based on the host cell to be transfected. Escherichia coli can be transformed according to the methods described in, for example, Proc. Natl. Acad. Sci. USA, 69, 2110 (1972), Gene, 17, 107 (1982) and the like. Methods for transducing the genus Bacillus are described in, for example, Molecular & General Genetics, 168, 111 (1979). Yeast cells are transduced using methods described in, for example, Methods in Enzymology, 194, 182-187 (1991), Proc. Natl. Acad. Sci. USA, 75, 1929 (1978) and the like. Insect cells are transfected using methods described in, for example, Bio/Technology, 6, 47-55 (1988) and the like. Mammalian cells are transfected using methods described in, for example, Cell Engineering additional volume 8, New Cell Engineering Experiment Protocol, 263-267 (1995) (published by Shujunsha), and Virology, 52, 456 (1973).

[0680] Cells comprising expression vectors of the present disclosure are cultured according to known methods, which vary depending on the host. For example, when Escherichia coli or genus Bacillus cells are cultured, a liquid medium is used. The medium preferably contains a carbon source, nitrogen source, inorganic substance and other components necessary for the growth of the transformant. Examples of the carbon source include glucose, dextrin, soluble starch, sucrose, and the like; examples of the nitrogen source include inorganic or organic substances such as ammonium salts, nitrate salts, corn steep liquor, peptone, casein, meat extract, soybean cake, potato extract, and the like; and examples of the inorganic substance include calcium chloride, sodium dihydrogen phosphate, magnesium chloride, and the like. The medium may also contain yeast extract, vitamins, growth promoting factors, and the like. The pH of the medium is preferably between about 5 to about 8. As a medium for culturing Escherichia coli, for example, M9 medium containing glucose and casamino acid (see, e.g., Journal of Experiments in Molecular Genetics, 431-433, Cold Spring Harbor Laboratory, New York 1972) is used. Escherichia coli is cultured at generally about 15 to about 43° C. Where necessary, aeration and stirring may be performed. The genus Bacillus is cultured at generally about 30 to about 40° C. Where necessary, aeration and stirring is performed.

[0681] Examples of medium suitable for culturing yeast include Burkholder minimum medium, SD medium containing 0.5% casamino acid, and the like. The pH of the medium is preferably about 5-about 8. The culture is performed at generally about 20° C. to about 35° C. Where necessary, aeration and stirring may be performed.

[0682] As a medium for culturing an insect cell or insect, Grace's Insect Medium containing an additive such as inactivated 10% bovine serum, and the like are used. The pH of the medium is preferably about 6.2 to about 6.4. Cells are cultured at about 27° C. Where necessary, aeration and stirring may be performed.

[0683] Mammalian cells are cultured, for example, in any one of minimum essential medium (MEM) containing about 5 to about 20% of fetal bovine serum, Dulbecco's modified Eagle medium (DMEM), RPMI 1640 medium, 199 medium, and the like. The pH of the medium is preferably about 6 to about 8. The culture is performed at about 30° C. to about 40° C. Where necessary, aeration and stirring may be performed.

### H. Packaging Systems and Methods Thereof

[0684] The present disclosure provides packaging systems useful for the recombinant preparation of a lyssavirus particle (e.g., rabies virus particle) described herein. In particular, the packaging systems provide necessary components required for the preparation of a lyssavirus particle (e.g., rabies virus particle) described herein. In certain embodiments, the packaging system is useful for the recombinant preparation of a lyssavirus particle (e.g., rabies virus particle) comprising a recombinant lyssavirus genome (e.g., rabies virus genome), wherein the genome lacks a G gene encoding for a lyssavirus envelope protein (e.g., rabies virus envelope protein) or a functional variant thereof; and/or the genome lacks an L gene encoding for a lyssavirus polymerase (e.g., rabies virus polymerase) or a functional variant thereof. In certain embodiments, the packaging system is useful for the recombinant preparation of a lyssavirus particle (e.g., rabies virus particle) comprising a recombinant lyssavirus genome (e.g., rabies virus genome), wherein the genome lacks a G gene encoding for a lyssavirus envelope protein (e.g., rabies virus envelope protein) or a functional variant thereof. In certain embodiments, the packaging system is useful for the recombinant preparation of a lyssavirus particle (e.g., rabies virus particle) comprising a recombinant lyssavirus genome (e.g., rabies virus genome), wherein the genome lacks a G gene encoding for a lyssavirus envelope protein (e.g., rabies virus envelope protein) or a functional variant thereof; and the genome lacks an L gene encoding for a lyssavirus polymerase (e.g., rabies virus polymerase) or a functional variant thereof.

[0685] The packaging systems described herein generally comprise or consist of: (i) an N gene encoding for a lyssavirus nucleoprotein (e.g., rabies virus nucleoprotein) or a functional variant thereof; (ii) a P gene encoding for a lyssavirus phosphoprotein (e.g., rabies virus phosphoprotein) or a functional variant thereof; and (iii) an L gene encoding for a lyssavirus polymerase (e.g., rabies virus polymerase) or a functional variant thereof. In certain embodiments, the packaging system further comprises an M gene encoding for a lyssavirus matrix protein (e.g., rabies virus matrix protein) or a functional variant thereof. In certain embodiments, the packaging system further comprises a G gene encoding for a heterologous envelope protein or a functional variant thereof.

[0686] The N, P, and L genes of the packaging system can be provided in one or more vectors (e.g., transfecting plasmids). For example, the packaging system can comprise a separate transfecting plasmid for each of the N, P, and L genes, e.g., a first transfecting plasmid comprising an N gene encoding for a lyssavirus nucleoprotein (e.g., rabies virus nucleoprotein) or a functional variant thereof; a second transfecting plasmid comprising a P gene encoding for a lyssavirus phosphoprotein (e.g., rabies virus phosphoprotein) or a functional variant thereof; and a third transfecting plasmid comprising an L gene encoding for a lyssavirus polymerase (e.g., rabies virus polymerase) or a functional variant thereof. In certain embodiments, a single transfecting plasmid comprises two or more of the N, P, and L genes. For example, the packaging system can comprise a transfecting plasmid comprising an N gene encoding for a lyssavirus nucleoprotein (e.g., rabies virus nucleoprotein) or a functional variant thereof, and a P gene encoding for a lyssavirus phosphoprotein (e.g., rabies virus phosphoprotein) or a functional variant thereof; the packaging system can comprise a transfecting plasmid comprising an N gene encoding for a lyssavirus nucleoprotein (e.g., rabies virus nucleoprotein) or a functional variant thereof, and an L gene encoding for a lyssavirus polymerase (e.g., rabies virus polymerase) or a functional variant thereof; the packaging system can comprise a transfecting plasmid comprising a P gene encoding for a lyssavirus phosphoprotein (e.g., rabies virus phosphoprotein) or a functional variant thereof, and an L gene encoding for a lyssavirus polymerase (e.g., rabies virus polymerase) or a functional variant thereof. In certain embodiments, the packaging system can comprise a transfecting plasmid comprising an N gene encoding for a lyssavirus nucleoprotein (e.g., rabies virus nucleoprotein) or a functional variant thereof, a P gene encoding for a lyssavirus phosphoprotein (e.g., rabies virus phosphoprotein) or a functional variant thereof, and an L gene encoding for a lyssavirus polymerase (e.g., rabies virus polymerase) or a functional variant thereof.

[0687] The M and G genes of the packaging system can be provided in one or more transfecting plasmids. In certain embodiments, the packaging system comprises a separate transfecting plasmid for the M and G genes. For example, in certain embodiments, the packaging system can further comprise a transfecting plasmid comprising an M gene encoding for a lyssavirus matrix protein (e.g., rabies virus matrix protein) or a functional variant thereof. In certain embodiments, the packaging system can further comprise a transfecting plasmid comprising a G gene encoding for a heterologous envelope protein or a functional variant thereof. The M and/or G gene can also be combined into a transfecting plasmid that comprises a N, P, and/or L gene as described herein. For example, a single transfecting plasmid can comprise an N gene encoding for a lyssavirus nucleoprotein (e.g., rabies virus nucleoprotein) or a functional variant thereof, a P gene encoding for a lyssavirus phosphoprotein (e.g., rabies virus phosphoprotein) or a functional variant thereof, an L gene encoding for a lyssavirus polymerase (e.g., rabies virus polymerase) or a functional variant thereof, an M gene encoding for a lyssavirus matrix protein (e.g., rabies virus matrix protein) or a functional variant thereof, and a G gene encoding for a heterologous envelope protein or a functional variant thereof. Various other combinations can readily be appreciated by those of ordinary skill in the art.

[0688] The N, P, L, M, and/or G genes can all be under control of one or more transcriptional regulatory elements. In certain embodiments, the transcriptional regulatory element comprises a promoter and/or enhancer sequence. In certain embodiments, the transcriptional regulatory element comprises an EF1α promoter. Various promoters and/or enhancer sequences are known in the art and are described herein as examples, and one of ordinary skill in the art would be able to select a suitable promoter and/or enhancer sequence for their needs.

[0689] Where two or more of the N, P, L, M, and/or G genes reside on the same vector, the two or more genes may be present in one or more expression cassettes. For example, each of the N, P, L, M, and/or G genes can be within their own expression cassette each comprising a transcriptional regulatory element and/or transcriptional termination element.

[0690] Where two or more genes reside in the same expression cassette, the genes may be separated by a linker sequence. In certain embodiments, the linker sequence is a ribosomal skipping element comprising a nucleic acid sequence that encodes for an internal ribosome entry site (IRES). As used herein, “an internal ribosome entry site” or “IRES” refers to an element that promotes direct internal ribosome entry to the initiation codon, such as ATG, of a protein coding region, thereby leading to cap-independent translation of the gene. Various internal ribosome entry sites are known to those of skill in the art, including, without limitation, IRES obtainable from viral or cellular mRNA sources, e.g., immunoglobulin heavy-chain binding protein (BiP); vascular endothelial growth factor (VEGF); fibroblast growth factor 2; insulin-like growth factor; translational initiation factor eIF4G; yeast transcription factors TFIID and HAP4; and IRES obtainable from, e.g., cardiovirus, rhinovirus, aphthovirus, HCV, Friend murine leukemia virus (FrMLV), and Moloney murine leukemia virus (MoMLV). In certain embodiments, the linker sequence is a ribosomal skipping element comprising a nucleic acid sequence that encodes for a self-cleaving peptide. As used herein, a “self-cleaving peptide” or “2A peptide” refers to an oligopeptide that allow multiple proteins to be encoded as polyproteins, which dissociate into component proteins upon translation. Use of the term “self-cleaving” is not intended to imply a proteolytic cleavage reaction. Various self-cleaving or 2A peptides are known to those of skill in the art, including, without limitation, those found in members of the Picornaviridae virus family, e.g., foot-and-mouth disease virus (FMDV), equine rhinitis A virus (ERAV0, Thosea asigna virus (TaV), and porcine tescho virus-1 (PTV-1); and carioviruses such as Theilovirus and encephalomyocarditis viruses. 2A peptides derived from FMDV, ERAV, PTV-1, and TaV are referred to herein as “F2A,” “E2A,” “P2A,” and “T2A,” respectively. Those of skill in the art would be able to select the appropriate linker sequence for their needs.

[0691] In certain embodiments, a single vector (e.g., transfecting plasmid) comprises a first expression cassette comprising the N and P genes, and a second expression cassette comprising the L gene. In certain embodiments, the first expression cassette comprises from 5′ to 3′: a transcriptional regulatory element; the P gene; and the N gene. In certain embodiments, the first expression cassette comprises from 5′ to 3′: a transcriptional regulatory element; the P gene; a ribosomal skipping element; and the N gene. In certain embodiments, the second expression cassette comprises from 5′ to 3′: a transcriptional regulatory element; and the L gene. In certain embodiments, the first expression cassette and the second expression cassette can be in the same orientation within the vector. In certain embodiments, the first expression cassette and the second expression cassette can be in the opposite orientation within the vector.

[0692] Accordingly, a packaging system of the present disclosure comprises: (i) a recombinant lyssavirus genome vector (e.g., virus genome transfecting plasmid, such as rabies virus genome vector); and (ii) one or more transfecting plasmids comprising the N, P, L, M, and/or G genes (i.e., heterologous G gene). The one or more transfecting plasmids comprising the N, P, L, M, and/or G genes (i.e., heterologous G gene) can be introduced into a host cell (e.g., a recombinant rabies virus particle packaging cell) using various methods known to those of ordinary skill in the art. For example, the one or more transfecting plasmids can be introduced into a suitable host cell by electroporation, nucleofection, or lipofection.

[0693] The present disclosure also provides a method for the recombinant preparation of a rabies virus particle, wherein the method comprises introducing a packaging system described herein into a cell under conditions operative for enveloping the recombinant rabies virus genome to form the recombinant rabies virus particle. In certain embodiments, host packaging cell can be transiently transfected with the one or more transfecting plasmids comprising the N, P, L, M, and/or G genes (i.e., heterologous G gene). In certain embodiments, the host packaging cell can be transfected with the one or more transfecting plasmids comprising the N, P, L, M, and/or G genes (i.e., heterologous G gene), wherein the host packaging cell is further made into a stable cell line. Various methods for producing stable cell lines are known to those of ordinary skill in the art. In general, the gene of interest (e.g., N, P, L, M and/or G genes) is introduced into a cell, and then into the nucleus of the cell, and finally integrated into the genome of the cell. Chromosomal integration events are rare and stably-integrated cell lines have to be selected and cultured. Various selection systems are known in the art, including resistance to antibiotics such as neomycin phosphotransferase, conferring resistance to G418, dihydrofolate reductase (DHFR), or glutamine synthetase. Other methods for producing stable cell lines include the use of the Sleeping Beauty (SB) system, as described in the Experimental Examples. Briefly, a transposon comprising the integrant of interest is designed with flanking inverted repeat/direct repeat sequences that result in precise integration into a TA dinucleotide. Methods for SB transposon based stable cell line generation is known in the art, see, e.g., Davidson et al., Cold Spring Harb Protoc. (2009) 4(8): 1018-1023. Stable cell lines can also be generated via the use of lentiviral vectors, see, e.g., Tandon et al., Bio Protoc. (2018) 8(21): e3073.

[0694] A recombinant lyssavirus genome vector (e.g., virus genome transfecting plasmid, such as rabies virus genome vector) is then introduced into a host packaging cell that has the N, P, L, M, and/or G genes stably-integrated or transiently transfected therein.

[0695] As such, in certain embodiments, a method for the recombinant preparation of a rabies virus particle comprises introducing (i) a recombinant lyssavirus genome vector (e.g., virus genome transfecting plasmid, such as rabies virus genome vector); and (ii) one or more transfecting plasmids comprising the N, P, L, M, and/or G genes into a host packaging cell. In certain embodiments, a method for the recombinant preparation of a lyssavirus particle (e.g., rabies virus particle) comprises introducing a recombinant lyssavirus genome vector (e.g., virus genome transfecting plasmid, such as rabies virus genome vector) into a host packaging cell, wherein the host packaging cell comprises the N, P, L, M, and/or G genes stably integrated therein. Methods for the preparation of recombinant lyssavirus particles (e.g., rabies virus particles) are known in the art, see, e.g., Trabelsi et al., Vaccine (2019) 37(47): 7052-7060; Wickersham et al., Nature Protoc. (2010) 5(3): 595-606; Ghanem et al., Eur. J. Cell Biol. (2012) 91: 10-16; Osakada and Wickersham, Nature Protoc. (2013) 8(8): 1583-1601; and Sullivan and Wickersham, Cold Spring Harb Protoc. (2015) 4: 386-91, the disclosures of which are herein incorporated by reference in their entireties.

[0696] In certain embodiments, the recombinant lyssavirus particle titer (e.g., rabies virus particle titer) that is obtained using a method of production described herein is greater than about 1E8 transducing units (TU)/mL. For example, in certain embodiments, the recombinant rabies virus particle titer that is obtained is about 8E7 TU/mL, about 9E7 TU/mL, about 1E8 TU/mL, about 1.1E8 TU/mL, about 1.2E8 TU/mL, about 1.3E8 TU/mL, about 1.4E8 TU/mL, about 1.5E8 TU/mL, about 1.6E8 TU/mL, about 1.7E8 TU/mL, about 1.8E8 TU/mL, about 1.9E8 TU/mL, about 2E8 TU/mL, about 2.5E8 TU/mL, about 3E8 TU/mL, about 3.5E8 TU/mL, about 4E8 TU/mL, about 4.5E8 TU/mL, about 5E8 TU/mL, about 5.5E8 TU/mL, about 6E8 TU/mL, about 6.5E8 TU/mL, about 7E8 TU/mL, about 7.5E8 TU/mL, about 8E8 TU/mL, about 8.5E8 TU/mL, about 9E8 TU/mL, about 9.1E8 TU/mL, about 9.2E8 TU/mL, about 9.3E8 TU/mL, about 9.4E8 TU/mL, about 9.5E8 TU/mL, about 9.6E8 TU/mL, about 9.7E8 TU/mL, about 9.8E8 TU/mL, about 9.9E8 TU/mL, about 1E9 TU/mL, about 1.1E9 TU/mL, about 1.2E9 TU/mL, or any value in between the aforementioned titers. In certain embodiments, the recombinant lyssavirus particle titer (e.g., rabies virus particle titer) that is obtained is from about 1E8 TU/mL to about 1E9 TU/mL, e.g., from 8E7 TU/mL to 1.2E9 TU/mL, and any range therebetween.

### I. Methods of Gene Therapy

[0697] Provided herein are methods of gene therapy using the pseudotyped recombinant lyssavirus particle (e.g., pseudotyped recombinant rabies virus particle) described herein. In certain embodiments, a method for expressing a therapeutic transgene in a target cell, is provided. In certain embodiments, a method for expressing a base editor in a target cell, is provided.

[0698] In certain embodiments, a method for expressing a therapeutic transgene in a target cell comprises transducing a target cell with a recombinant rabies virus particle as described herein. For example, a method for expressing a therapeutic transgene in a target cell comprises transducing a target cell with a pseudotyped recombinant lyssavirus particle (e.g., pseudotyped recombinant rabies virus particle) comprising a heterologous envelope protein; and a recombinant lyssavirus genome (e.g., rabies virus genome) comprising a nucleic acid encoding a therapeutic transgene, wherein: the genome lacks a G gene encoding for a lyssavirus envelope protein (e.g., rabies virus envelope protein) or a functional variant thereof; and/or the genome lacks an L gene encoding for a lyssavirus polymerase (e.g., rabies virus polymerase) or a functional variant thereof. In certain embodiments, the method comprises transducing a target cell with a pseudotyped recombinant lyssavirus particle (e.g., pseudotyped recombinant rabies virus particle) comprising a heterologous envelope protein; and a recombinant lyssavirus genome (e.g., rabies virus genome) comprising a nucleic acid encoding a therapeutic transgene, wherein: the genome lacks a G gene encoding for a lyssavirus envelope protein (e.g., rabies envelope protein) or a functional variant thereof. In certain embodiments, the method comprises transducing a target cell with a pseudotyped recombinant lyssavirus particle (e.g., pseudotyped recombinant rabies virus particle) comprising a heterologous envelope protein; and a recombinant lyssavirus genome (e.g., rabies virus genome) comprising a nucleic acid encoding a therapeutic transgene, wherein: the genome lacks a G gene encoding for a lyssavirus envelope protein (e.g., rabies envelope protein) or a functional variant thereof; and the genome lacks an L gene encoding for a lyssavirus polymerase (e.g., rabies virus polymerase) or a functional variant thereof.

[0699] Various methods of transducing a target cell with a pseudotyped recombinant virus particle are known to those of ordinary skill in the art. For example, the target cell can be contacted with the pseudotyped recombinant virus particle, resulting in receptor-mediated attachment of the virus particle, followed by clathrin-dependent endocytosis of the virus particle into the cell.

[0700] In certain embodiments, methods are provided for expressing a nucleobase editor in a target cell. For example, such methods comprise transducing a target cell with a pseudotyped recombinant lyssavirus particle (e.g., pseudotyped recombinant rabies virus particle), wherein the recombinant virus particle comprises: a heterologous envelope protein; and a recombinant lyssavirus genome (e.g., rabies virus genome) comprising a nucleic acid encoding a nucleobase editor comprising a polynucleotide programmable nucleotide binding domain and a nucleobase editing domain, wherein: the genome lacks a G gene encoding for a lyssavirus envelope protein (e.g., rabies virus envelope protein) or a functional variant thereof; and/or the genome lacks an L gene encoding for a lyssavirus polymerase (e.g., rabies virus polymerase) or a functional variant thereof. In certain embodiments, the method comprises transducing a target cell with a pseudotyped recombinant lyssavirus particle (e.g., pseudotyped recombinant rabies virus particle), wherein the pseudotyped recombinant virus particle comprises: a heterologous envelope protein; and a recombinant lyssavirus genome (e.g., rabies virus genome) comprising a nucleic acid encoding a nucleobase editor comprising a polynucleotide programmable nucleotide binding domain and a nucleobase editing domain, wherein: the genome lacks a G gene encoding for a lyssavirus envelope protein (e.g., rabies virus envelope protein) or a functional variant thereof. In certain embodiments, the method comprises transducing a target cell with a pseudotyped recombinant lyssavirus particle (e.g., pseudotyped recombinant rabies virus particle), wherein the pseudotyped recombinant virus particle comprises: a heterologous envelope protein; and a recombinant lyssavirus genome (e.g., rabies virus genome) comprising a nucleic acid encoding a nucleobase editor comprising a polynucleotide programmable nucleotide binding domain and a nucleobase editing domain, wherein: the genome lacks a G gene encoding for a lyssavirus envelope protein (e.g., rabies virus envelope protein) or a functional variant thereof; and the genome lacks an L gene encoding for a lyssavirus polymerase (e.g., rabies virus polymerase) or a functional variant thereof.

[0701] Where the methods are for expressing a nucleobase editor in a target cell, the polynucleotide programmable nucleotide binding domain, when in conjunction with a bound guide polynucleotide (e.g., gRNA), can specifically bind to a target polynucleotide sequence and thereby localize the base editor to the target nucleic acid sequence desired to be edited.

[0702] In certain embodiments, the gRNA is provided to the target cell in cis. For example, the gRNA can be comprised within the recombinant lyssavirus genome (e.g., rabies virus genome). The gRNA can be comprised within the recombinant lyssavirus genome (e.g., rabies virus genome) at any location, for example, between a one or more lyssavirus genes (e.g., an N gene or a P gene) and the nucleic acid encoding the nucleobase editor, or between two lyssavirus virus genes, or at a terminal end of the recombinant lyssavirus genome (e.g., the 5′ end, or the 3′ end).

[0703] In certain embodiments, the gRNA is provided to the target cell in trans (e.g., provided exogenously). For example, the gRNA can be comprises within a separate vector outside of the pseudotyped recombinant lyssavirus particle (e.g., pseudotyped recombinant rabies virus particle). Suitable vectors include, without limitation, viral vectors, plasmids, and other known to those of skill in the art. In embodiments where the gRNA is provided to the target cell in trans, the gRNA vector is introduced into the target cell via various methods known to those of skill in the art, for example, without limitation, electroporation.

[0704] Methods for delivering a therapeutic transgene (e.g., a nucleobase editor) to a subject are also provided. In certain embodiments, the method comprises administering to the subject a pseudotyped recombinant lyssavirus particle (e.g., pseudotyped recombinant rabies virus particle), wherein the pseudotyped recombinant virus particle comprises: a heterologous envelope protein; and a recombinant lyssavirus genome (e.g., rabies virus genome) comprising a nucleic acid encoding the therapeutic transgene (e.g., a nucleobase editor comprising a polynucleotide programmable nucleotide binding domain and a nucleobase editing domain), wherein: the genome lacks a G gene encoding for a lyssavirus envelope protein (e.g., rabies virus envelope protein) or a functional variant thereof; and/or the genome lacks an L gene encoding for a lyssavirus polymerase (e.g., rabies virus polymerase) or a functional variant thereof. In certain embodiments, the method comprises administering to the subject a pseudotyped recombinant lyssavirus particle (e.g., pseudotyped recombinant rabies virus particle), wherein the pseudotyped recombinant virus particle comprises: a heterologous envelope protein; and a recombinant lyssavirus genome (e.g., rabies virus genome) comprising a nucleic acid encoding the therapeutic transgene (e.g., a nucleobase editor comprising a polynucleotide programmable nucleotide binding domain and a nucleobase editing domain), wherein: the genome lacks a G gene encoding for a lyssavirus envelope protein (e.g., rabies virus envelope protein) or a functional variant thereof. In certain embodiments, the method comprises administering to the subject a pseudotyped recombinant lyssavirus particle (e.g., pseudotyped recombinant rabies virus particle), wherein the recombinant virus particle comprises: a heterologous envelope protein; and a recombinant lyssavirus genome (e.g., rabies virus genome) comprising a nucleic acid encoding the therapeutic transgene (e.g., a nucleobase editor comprising a polynucleotide programmable nucleotide binding domain and a nucleobase editing domain), wherein: the genome lacks a G gene encoding for a lyssavirus envelope protein (e.g., rabies virus envelope protein) or a functional variant thereof; and the genome lacks an L gene encoding for a lyssavirus polymerase (e.g., rabies virus polymerase) or a functional variant thereof.

[0705] The methods of delivery and/or expressing a therapeutic transgene (e.g., a nucleobase editor comprising a polynucleotide programmable nucleotide binding domain and a nucleobase editing domain) find use in the treatment of a disease or disorder. In certain embodiments, a method of treating a disease or disorder in a subject comprises administering a pseudotyped recombinant lyssavirus particle (e.g., pseudotyped recombinant rabies virus particle) described herein, or a pharmaceutical composition described herein. In certain embodiments, the disease or disorder is a neurologic disease or disorder. In certain embodiments, the disease or disorder is a ophthalmic disease or disorder.

[0706] Administration of the pharmaceutical compositions contemplated herein may be carried out using conventional techniques including, but not limited to, infusion, transfusion, or parenterally. In some embodiments, parenteral administration includes infusing or injecting intravascularly, intravenously, intramuscularly, intraarterially, intrathecally, intratumorally, intradermally, intraperitoneally, transtracheally, subcutaneously, subcuticularly, intraarticularly, subcapsularly, subarachnoidly and intrasternally.

[0707] The practice of the present invention employs, unless otherwise indicated, conventional techniques of molecular biology (including recombinant techniques), microbiology, cell biology, biochemistry and immunology, which are well within the purview of the skilled artisan. Such techniques are explained fully in the literature, such as, “Molecular Cloning: A Laboratory Manual”, second edition (Sambrook, 1989); “Oligonucleotide Synthesis” (Gait, 1984); “Animal Cell Culture” (Freshney, 1987); “Methods in Enzymology” “Handbook of Experimental Immunology” (Weir, 1996); “Gene Transfer Vectors for Mammalian Cells” (Miller and Calos, 1987); “Current Protocols in Molecular Biology” (Ausubel, 1987); “PCR: The Polymerase Chain Reaction”, (Mullis, 1994); “Current Protocols in Immunology” (Coligan, 1991). These techniques are applicable to the production of the polynucleotides and polypeptides of the invention, and, as such, may be considered in making and practicing the invention. Particularly useful techniques for particular embodiments will be discussed in the sections that follow.

[0708] The following examples are put forth so as to provide those of ordinary skill in the art with a complete disclosure and description of how to make and use the assay, screening, and therapeutic methods of the invention, and are not intended to limit the scope of what the inventors regard as their invention.

### J. Experimental Examples

### Example 1—Materials & Methods

### Production of Pseudotyped RABV Particles

[0709] For production of pseudotyped RABV particles, 293T producer cells were transfected with a combination of the viral replicon plasmid and one or more complement plasmids in suspension using up to 0.5 μg of glycoprotein with Lipofectamine 3000 for each pseudotype and seeded onto tissue-culture treated plates/flasks. The complement plasmids express RABV N, P, L, and G genes, along with T7 polymerase. The following day, fresh media (OptiMEM+5% FBS or DMEM+10% FBS) was exchanged and then viral supernatant was harvested beginning at day 3-7 post-transfection. The supernatant was pooled, optionally concentrated 10-fold by volume with LentiX (Takara Biosciences), and spun free of cellular debris. Subsequent viral amplification was done by simply overlaying starter supernatant onto any heterologous envelope protein-expressing producer cell lines to produce pseudotyped-virus with harvests typically taken from day 2-10 post-transduction. Amplified viral stock (passage 1) was likewise pooled from daily harvests and then spun and filtered prior to downstream applications.

### Example 2—Pseudotyped RABV Particles (1)

[0710] Pseudotyped recombinant RABV particles expressing GFP were generated, as described above. RABV ΔG particles expressing GFP where pseudotyped with one of several rhabdovirus envelope proteins (MOKV, VSV, EKV1, and EKV2 envelope proteins). To test viral entry, 293T cells were infected with the pseudotyped recombinant RABV particles, using 30 μL, 15 μL, 10 μL, 5 μL, 2 μL, or 1 μL of cell culture supernantant (2 days postinfection supernantant or 4 days postinfection supernantant). GFP expression was monitored by fluorescence microscopy and the % GFP-positive cells was determined as a readout for % viral entry. All imaging is done on a Zeiss AxioVert fluorescent microscope using DAPI, GFP/FITC, or Cy3 channels. As shown in FIG. 1, viral entry into cells was detected in RABV particles pseudotyped with MOKV envelope protein and VSV envelope protein.

[0711] RABV ΔG particles expressing GFP where pseudotyped with additional envelope proteins in the togavirus and flavivirus families. Among the togaviruses, envelope proteins of the alphaviruses SINV, SFV, and WEEV were employed. Among the flaviviruses, envelope proteins of the pegiviruses PGV1 and PGV2 were employed. The rhabdovirus envelope proteins of RABV, MOKV, and VSV were also employed. GFP fluorescence was monitored by microscopy 1 day postinfection (FIG. 2A) and 4 days postinfection (FIG. 2B). Increased fluorescent insentisty was observed at 4 days postinfection for all tested pseudotyped RABV particles, indicating that each pseudotyped RABV particle was capable of infecting a human cell.

[0712] Pseudotyped RABV particles were next tested for their ability to infect a wide range of mammalian cells. RABV ΔG particles expressing GFP were pseudotyped with one of a SINV, SFV, WEEV, RABV, MOKV, VSV, PGV1, or PGV2 envelope protein. Vero, HEK, BHK, BHK-NPL (BHK cells expressing the RABV N, P, and L genes), ARPE, MOLT4, Jurkat, and K562 cell lines were employed. 16 μL of cell culture supernantant (2 days postinfection supernantant) were used to infect the cell lines. As shown in FIG. 3, VSV G-pseudotyped RABV particles were capable of infecting all cells tested. Moreover, several other pseudotyped RABV particles were capable of infecting one or more of the cells tested.

### Example 3—Pseudotyped RABV Particles (2)

[0713] Pseudotyped recombinant Rabies SAD B19 AG particles expressing GFP were generated, as described above (VIR045 RABV ΔG GFP). RABV ΔG particles expressing GFP were pseudotyped with one of several envelope proteins in the togavirus and rhadovirus families.

[0714] Among the rhabdoviruses, envelope proteins of RABV, MOKV, VSV, and COCV were employed. Among the togaviruses, envelope proteins of the alphaviruses CHIKV, MAYV, RRV, EEEV, VEEV, and WEEV were employed.

[0715] Pseudotyped RABV particles were next tested for their ability to infect a wide range of mammalian cells, each cell type being a proxy for a particular mammalian tissue or organ. RABV ΔG particles expressing GFP were pseudotyped with RABV, MOKV, VSV, COCV, CHIKV, MAYV, RRV, EEEV, VEEV, and WEEV envelope protein.

[0716] To test viral entry Jurkat (T cell derived), N2a (neuroblast derived), C2C12 (myoblast derived), Huh7 (hepatocyte derived), Vero (kidney epithelial derived), 293T (embryonic kidney cell derived), A549 (alveolar cell derived), SKNSH (neuroblastoma derived), U2OS (bone tissue derived), Hep3B (liver cell derived), and primary fibroblast cell lines were employed. These cell lines were infected with the pseudotyped recombinant RABV particles using 30 μL of cell culture supernantant for Jurkat, N2a, C2C12, Huh7, and 293T cells (FIG. 4A and FIG. 4C), and 2 μL of cell culture supernantant for vero and Huh7 cells (FIG. 4B). GFP expression was monitored by fluorescence microscopy and the % GFP-positive cells was determined as a readout for % viral entry. All imaging is done on a Zeiss AxioVert fluorescent microscope using DAPI, GFP/FITC, or Cy3 channels.

[0717] As shown in FIG. 4A, VSV, COCV, and EEEV G-pseudotyped RABV particles were capable of infecting all four cell lines tested (Jurkat, N2a, C2C12, and Huh7 cells). Moreover, all other pseudotyped RABV particles were capable of infecting N2a, C2C12, and Huh7 cells.

[0718] As shown in FIG. 4B, all pseudotyped RABV particles were capable of infecting Vero and Huh7 cells, with VSV, COCV and WEEV having a viral entry rate of 50% or more.

[0719] As shown in FIG. 4C, all pseudotyped RABV particles (BASV and BEFV) were capable of infecting 293T cells.

### Example 4—Pseudotyped RABV Particles (3)

[0720] Pseudotyped recombinant Rabies SAD B19 AG particles expressing GFP were generated, as described above. RABV ΔG particles expressing GFP were pseudotyped with the envelope proteins from the rhabdovirus, filovirus, and togavirus. These envelope proteins include: RABV, BEFV, BASV, MARV, CHIKV, MAYV, and ONNV.

[0721] FIG. 5A-FIG. 5D shows the capacity of the RAB250 set, a set of recombinant Rabies SAD B19 ΔG particles expressing GFP wand pseudotyped with several different envelope proteins to infect more of the cell lines tested. This set is composed of pseudotyped recombinant Rabies SAD B19 ΔG particles expressing GFP pseudotyped with the envelope proteins from RABV, BEFV, BASV, MARV, CHIKV, MAYV, and ONNV that was tested at a titer of 2.5e4 cells.

[0722] As shown in FIG. 5A, RABV particles pseudotyped with envelop proteins from RABV showed the highest transduction into all three cell lines tested (293T, A549, and primary fibroblasts). Furthermore, FIG. 5B shows that RABV particles pseudotyped with envelop proteins from RABV exhibited the highest transduction into N2a and SKNSH cells.

[0723] These results are also evident in FIG. 5C and FIG. 5D that show RABV particles pseudotyped with envelop proteins from RABV exhibited the highest transduction into C2C12 and U2OS (FIG. 5C) and Huh7 and Hep3B (FIG. 5D) cells.

### K. Sequence Listing

| | SEQ ID | |
|---|---|---|
| Description | NO: | Sequence |
| Adenosine | 8 | MSEVEFSHEYWMRHALTLAKRARDEREVPVGAVLVLNNRVIGEGW |
| Deaminase | | NRAIGLHDPTAHAEIMALRQGGLVMQNYRLIDATLYVTFEPCVMCA |
| Reference | | GAMIHSRIGRVVFGVRNAKTGAAGSLMDVLHYPGMNHRVEITEGIL |
| Sequence | | ADECAALLCYFFRMPRQVFNAQKKAQSSTD |
| BhCas12b | 274 | GCCACCATGGCCCCAAAGAAGAAGCGGAAGGTCGGTATCCACG |
| GGSGGS-ABE8- | | GAGTCCCAGCAGCCGCCACCAGATCCTTCATCCTGAAGATCGA |
| Xten20 at P153 | | GCCCAACGAGGAAGTGAAGAAAGGCCTCTGGAAAACCCACGAG |
| polynucleotide | | GTGCTGAACCACGGAATCGCCTACTACATGAATATCCTGAAGCT |
| | | GATCCGGCAAGAGGCCATCTACGAGCACCACGAGCAGGACCCC |
| | | AAGAATCCCAAGAAGGTGTCCAAGGCCGAGATCCAGGCCGAGC |
| | | TGTGGGATTTCGTGCTGAAGATGCAGAAGTGCAACAGCTTCACA |
| | | CACGAGGTGGACAAGGACGAGGTGTTCAACATCCTGAGAGAGC |
| | | TGTACGAGGAACTGGTGCCCAGCAGCGTGGAAAAGAAGGGCGA |
| | | AGCCAACCAGCTGAGCAACAAGTTTCTGTACCCTCTGGTGGACC |
| | | CCAACAGCCAGTCTGGAAAGGGAACAGCCAGCAGCGGCAGAAA |
| | | GCCCAGATGGTACAACCTGAAGATTGCCGGCGATCCCGGAGGC |
| | | TCTGGAGGAAGCTCCGAAGTCGAGTTTTCCCATGAGTACTGGAT |
| | | GAGACACGCATTGACTCTCGCAAAGAGGGCTCGAGATGAACGC |
| | | GAGGTGCCCGTGGGGGCAGTACTCGTGCTCAACAATCGCGTAA |
| | | TCGGCGAAGGTTGGAATAGGGCAATCGGACTCCACGACCCCAC |
| | | TGCACATGCGGAAATCATGGCCCTTCGACAGGGAGGGCTTGTG |
| | | ATGCAGAATTATCGACTTTATGATGCGACGCTGTACGTCACGTTT |
| | | GAACCTTGCGTAATGTGCGCGGGAGCTATGATTCACTCCCGCAT |
| | | TGGACGAGTTGTATTCGGTGTTCGCAACGCCAAGACGGGTGCC |
| | | GCAGGTTCACTGATGGACGTGCTGCATCATCCAGGCATGAACCA |
| | | CCGGGTAGAAATCACAGAAGGCATATTGGCGGACGAATGTGCG |
| | | GCGCTGTTGTGTCGTTTTTTTCGCATGCCCAGGCGGGTCTTTAA |
| | | CGCCCAGAAAAAAGCACAATCCTCTACTGACGGCTCTTCTGGAT |
| | | CTGAAACACCTGGCACAAGCGAGAGCGCCACCCCTGAGAGCTC |
| | | TGGCTCCTGGGAAGAAGAGAAGAAGAAGTGGGAAGAAGATAAG |
| | | AAAAAGGACCCGCTGGCCAAGATCCTGGGCAAGCTGGCTGAGT |
| | | ACGGACTGATCCCTCTGTTCATCCCCTACACCGACAGCAACGAG |
| | | CCCATCGTGAAAGAAATCAAGTGGATGGAAAAGTCCCGGAACCA |
| | | GAGCGTGCGGCGGCTGGATAAGGACATGTTCATTCAGGCCCTG |
| | | GAACGGTTCCTGAGCTGGGAGAGCTGGAACCTGAAAGTGAAAG |
| | | AGGAATACGAGAAGGTCGAGAAAGAGTACAAGACCCTGGAAGA |
| | | GAGGATCAAAGAGGACATCCAGGCTCTGAAGGCTCTGGAACAG |
| | | TATGAGAAAGAGCGGCAAGAACAGCTGCTGCGGGACACCCTGA |
| | | ACACCAACGAGTACCGGCTGAGCAAGAGAGGCCTTAGAGGCTG |
| | | GCGGGAAATCATCCAGAAATGGCTGAAAATGGACGAGAACGAG |
| | | CCCTCCGAGAAGTACCTGGAAGTGTTCAAGGACTACCAGCGGA |
| | | AGCACCCTAGAGAGGCCGGCGATTACAGCGTGTACGAGTTCCT |
| | | GTCCAAGAAAGAGAACCACTTCATCTGGCGGAATCACCCTGAGT |
| | | ACCCCTACCTGTACGCCACCTTCTGCGAGATCGACAAGAAAAAG |
| | | AAGGACGCCAAGCAGCAGGCCACCTTCACACTGGCCGATCCTA |
| | | TCAATCACCCTCTGTGGGTCCGATTCGAGGAAAGAAGCGGCAG |
| | | CAACCTGAACAAGTACAGAATCCTGACCGAGCAGCTGCACACC |
| | | GAGAAGCTGAAGAAAAAGCTGACAGTGCAGCTGGACCGGCTGA |
| | | TCTACCCTACAGAATCTGGCGGCTGGGAAGAGAAGGGCAAAGT |
| | | GGACATTGTGCTGCTGCCCAGCCGGCAGTTCTACAACCAGATCT |
| | | TCCTGGACATCGAGGAAAAGGGCAAGCACGCCTTCACCTACAA |
| | | GGATGAGAGCATCAAGTTCCCTCTGAAGGGCACACTCGGCGGA |
| | | GCCAGAGTGCAGTTCGACAGAGATCACCTGAGAAGATACCCTCA |
| | | CAAGGTGGAAAGCGGCAACGTGGGCAGAATCTACTTCAACATG |
| | | ACCGTGAACATCGAGCCTACAGAGTCCCCAGTGTCCAAGTCTCT |
| | | GAAGATCCACCGGGACGACTTCCCCAAGGTGGTCAACTTCAAG |
| | | CCCAAAGAACTGACCGAGTGGATCAAGGACAGCAAGGGCAAGA |
| | | AACTGAAGTCCGGCATCGAGTCCCTGGAAATCGGCCTGAGAGT |
| | | GATGAGCATCGACCTGGGACAGAGACAGGCCGCTGCCGCCTCT |
| | | ATTTTCGAGGTGGTGGATCAGAAGCCCGACATCGAAGGCAAGC |
| | | TGTTTTTCCCAATCAAGGGCACCGAGCTGTATGCCGTGCACAGA |
| | | GCCAGCTTCAACATCAAGCTGCCCGGCGAGACACTGGTCAAGA |
| | | GCAGAGAAGTGCTGCGGAAGGCCAGAGAGGACAATCTGAAACT |
| | | GATGAACCAGAAGCTCAACTTCCTGCGGAACGTGCTGCACTTCC |
| | | AGCAGTTCGAGGACATCACCGAGAGAGAGAAGCGGGTCACCAA |
| | | GTGGATCAGCAGACAAGAGAACAGCGACGTGCCCCTGGTGTAC |
| | | CAGGATGAGCTGATCCAGATCCGCGAGCTGATGTACAAGCCTTA |
| | | CAAGGACTGGGTCGCCTTCCTGAAGCAGCTCCACAAGAGACTG |
| | | GAAGTCGAGATCGGCAAAGAAGTGAAGCACTGGCGGAAGTCCC |
| | | TGAGCGACGGAAGAAAGGGCCTGTACGGCATCTCCCTGAAGAA |
| | | CATCGACGAGATCGATCGGACCCGGAAGTTCCTGCTGAGATGG |
| | | TCCCTGAGGCCTACCGAACCTGGCGAAGTGCGTAGACTGGAAC |
| | | CCGGCCAGAGATTCGCCATCGACCAGCTGAATCACCTGAACGC |
| | | CCTGAAAGAAGATCGGCTGAAGAAGATGGCCAACACCATCATCA |
| | | TGCACGCCCTGGGCTACTGCTACGACGTGCGGAAGAAGAAATG |
| | | GCAGGCTAAGAACCCCGCCTGCCAGATCATCCTGTTCGAGGAT |
| | | CTGAGCAACTACAACCCCTACGAGGAAAGGTCCCGCTTCGAGA |
| | | ACAGCAAGCTCATGAAGTGGTCCAGACGCGAGATCCCCAGACA |
| | | GGTTGCACTGCAGGGCGAGATCTATGGCCTGCAAGTGGGAGAA |
| | | GTGGGCGCTCAGTTCAGCAGCAGATTCCACGCCAAGACAGGCA |
| | | GCCCTGGCATCAGATGTAGCGTCGTGACCAAAGAGAAGCTGCA |
| | | GGACAATCGGTTCTTCAAGAATCTGCAGAGAGAGGGCAGACTG |
| | | ACCCTGGACAAAATCGCCGTGCTGAAAGAGGGCGATCTGTACC |
| | | CAGACAAAGGCGGCGAGAAGTTCATCAGCCTGAGCAAGGATCG |
| | | GAAGTGCGTGACCACACACGCCGACATCAACGCCGCTCAGAAC |
| | | CTGCAGAAGCGGTTCTGGACAAGAACCCACGGCTTCTACAAGG |
| | | TGTACTGCAAGGCCTACCAGGTGGACGGCCAGACCGTGTACAT |
| | | CCCTGAGAGCAAGGACCAGAAGCAGAAGATCATCGAAGAGTTC |
| | | GGCGAGGGCTACTTCATTCTGAAGGACGGGGTGTACGAATGGG |
| | | TCAACGCCGGCAAGCTGAAAATCAAGAAGGGCAGCTCCAAGCA |
| | | GAGCAGCAGCGAGCTGGTGGATAGCGACATCCTGAAAGACAGC |
| | | TTCGACCTGGCCTCCGAGCTGAAAGGCGAAAAGCTGATGCTGT |
| | | ACAGGGACCCCAGCGGCAATGTGTTCCCCAGCGACAAATGGAT |
| | | GGCCGCTGGCGTGTTCTTCGGAAAGCTGGAACGCATCCTGATC |
| | | AGCAAGCTGACCAACCAGTACTCCATCAGCACCATCGAGGACG |
| | | ACAGCAGCAAGCAGTCTATGAAAAGGCCGGCGGCCACGAAAAA |
| | | GGCCGGCCAGGCAAAAAAGAAAAAGGGATCCTACCCATACGAT |
| | | GTTCCAGATTACGCTTATCCCTACGACGTGCCTGATTATGCATAC |
| | | CCATATGATGTCCCCGACTATGCCTAA |
| BhCas12b | 275 | MAPKKKRKVGIHGVPAAATRSFILKIEPNEEVKKGLWKTHEVLNHGI |
| GGSGGS-ABE8- | | AYYMNILKLIRQEAIYEHHEQDPKNPKKVSKAEIQAELWDFVLKMQK |
| Xten20 at P153 | | CNSFTHEVDKDEVFNILRELYEELVPSSVEKKGEANQLSNKFLYPLV |
| polypeptide | | DPNSQSGKGTASSGRKPRWYNLKIAGDPGGSGGSSEVEFSHEYW |
| | | MRHALTLAKRARDEREVPVGAVLVLNNRVIGEGWNRAIGLHDPTA |
| | | HAEIMALRQGGLVMQNYRLYDATLYVTFEPCVMCAGAMIHSRIGRV |
| | | VFGVRNAKTGAAGSLMDVLHHPGMNHRVEITEGILADECAALLCRF |
| | | FRMPRRVFNAQKKAQSSTDGSSGSETPGTSESATPESSGSWEEE |
| | | KKKWEEDKKKDPLAKILGKLAEYGLIPLFIPYTDSNEPIVKEIKWMEK |
| | | SRNQSVRRLDKDMFIQALERFLSWESWNLKVKEEYEKVEKEYKTL |
| | | EERIKEDIQALKALEQYEKERQEQLLRDTLNTNEYRLSKRGLRGWR |
| | | EIIQKWLKMDENEPSEKYLEVFKDYQRKHPREAGDYSVYEFLSKKE |
| | | NHFIWRNHPEYPYLYATFCEIDKKKKDAKQQATFTLADPINHPLWV |
| | | RFEERSGSNLNKYRILTEQLHTEKLKKKLTVQLDRLIYPTESGGWEE |
| | | KGKVDIVLLPSRQFYNQIFLDIEEKGKHAFTYKDESIKFPLKGTLGGA |
| | | RVQFDRDHLRRYPHKVESGNVGRIYFNMTVNIEPTESPVSKSLKIH |
| | | RDDFPKWNFKPKELTEWIKDSKGKKLKSGIESLEIGLRVMSIDLGQ |
| | | RQAAAASIFEVVDQKPDIEGKLFFPIKGTELYAVHRASFNIKLPGETL |
| | | VKSREVLRKAREDNLKLMNQKLNFLRNVLHFQQFEDITEREKRVTK |
| | | WISRQENSDVPLVYQDELIQIRELMYKPYKDWVAFLKQLHKRLEVEI |
| | | GKEVKHWRKSLSDGRKGLYGISLKNIDEIDRTRKFLLRWSLRPTEP |
| | | GEVRRLEPGQRFAIDQLNHLNALKEDRLKKMANTIIMHALGYCYDV |
| | | RKKKWQAKNPACQIILFEDLSNYNPYEERSRFENSKLMKWSRREIP |
| | | RQVALQGEIYGLQVGEVGAQFSSRFHAKTGSPGIRCSVVTKEKLQ |
| | | DNRFFKNLQREGRLTLDKIAVLKEGDLYPDKGGEKFISLSKDRKCVT |
| | | THADINAAQNLQKRFWTRTHGFYKVYCKAYQVDGQTVYIPESKDQ |
| | | KQKIIEEFGEGYFILKDGVYEWVNAGKLKIKKGSSKQSSSELVDSDIL |
| | | KDSFDLASELKGEKLMLYRDPSGNVFPSDKWMAAGVFFGKLERILI |
| | | SKLTNQYSISTIEDDSSKQSMKRPAATKKAGQAKKKKGSYPYDVPD |
| | | YAYPYDVPDYAYPYDVPDYA |
| BhCas12b | 276 | GCCACCATGGCCCCAAAGAAGAAGCGGAAGGTCGGTATCCACG |
| GGSGGS-ABE8- | | GAGTCCCAGCAGCCGCCACCAGATCCTTCATCCTGAAGATCGA |
| Xten20 at K255 | | GCCCAACGAGGAAGTGAAGAAAGGCCTCTGGAAAACCCACGAG |
| polynucleotide | | GTGCTGAACCACGGAATCGCCTACTACATGAATATCCTGAAGCT |
| | | GATCCGGCAAGAGGCCATCTACGAGCACCACGAGCAGGACCCC |
| | | AAGAATCCCAAGAAGGTGTCCAAGGCCGAGATCCAGGCCGAGC |
| | | TGTGGGATTTCGTGCTGAAGATGCAGAAGTGCAACAGCTTCACA |
| | | CACGAGGTGGACAAGGACGAGGTGTTCAACATCCTGAGAGAGC |
| | | TGTACGAGGAACTGGTGCCCAGCAGCGTGGAAAAGAAGGGCGA |
| | | AGCCAACCAGCTGAGCAACAAGTTTCTGTACCCTCTGGTGGACC |
| | | CCAACAGCCAGTCTGGAAAGGGAACAGCCAGCAGCGGCAGAAA |
| | | GCCCAGATGGTACAACCTGAAGATTGCCGGCGATCCCTCCTGG |
| | | GAAGAAGAGAAGAAGAAGTGGGAAGAAGATAAGAAAAAGGACC |
| | | CGCTGGCCAAGATCCTGGGCAAGCTGGCTGAGTACGGACTGAT |
| | | CCCTCTGTTCATCCCCTACACCGACAGCAACGAGCCCATCGTGA |
| | | AAGAAATCAAGTGGATGGAAAAGTCCCGGAACCAGAGCGTGCG |
| | | GCGGCTGGATAAGGACATGTTCATTCAGGCCCTGGAACGGTTC |
| | | CTGAGCTGGGAGAGCTGGAACCTGAAAGTGAAAGAGGAATACG |
| | | AGAAGGTCGAGAAAGAGTACAAGACCCTGGAAGAGAGGATCAA |
| | | AGGAGGCTCTGGAGGAAGCTCCGAAGTCGAGTTTTCCCATGAG |
| | | TACTGGATGAGACACGCATTGACTCTCGCAAAGAGGGCTCGAG |
| | | ATGAACGCGAGGTGCCCGTGGGGGCAGTACTCGTGCTCAACAA |
| | | TCGCGTAATCGGCGAAGGTTGGAATAGGGCAATCGGACTCCAC |
| | | GACCCCACTGCACATGCGGAAATCATGGCCCTTCGACAGGGAG |
| | | GGCTTGTGATGCAGAATTATCGACTTTATGATGCGACGCTGTAC |
| | | GTCACGTTTGAACCTTGCGTAATGTGCGCGGGAGCTATGATTCA |
| | | CTCCCGCATTGGACGAGTTGTATTCGGTGTTCGCAACGCCAAGA |
| | | CGGGTGCCGCAGGTTCACTGATGGACGTGCTGCATCATCCAGG |
| | | CATGAACCACCGGGTAGAAATCACAGAAGGCATATTGGCGGAC |
| | | GAATGTGCGGCGCTGTTGTGTCGTTTTTTTCGCATGCCCAGGCG |
| | | GGTCTTTAACGCCCAGAAAAAAGCACAATCCTCTACTGACGGCT |
| | | CTTCTGGATCTGAAACACCTGGCACAAGCGAGAGCGCCACCCC |
| | | TGAGAGCTCTGGCGAGGACATCCAGGCTCTGAAGGCTCTGGAA |
| | | CAGTATGAGAAAGAGCGGCAAGAACAGCTGCTGCGGGACACCC |
| | | TGAACACCAACGAGTACCGGCTGAGCAAGAGAGGCCTTAGAGG |
| | | CTGGCGGGAAATCATCCAGAAATGGCTGAAAATGGACGAGAAC |
| | | GAGCCCTCCGAGAAGTACCTGGAAGTGTTCAAGGACTACCAGC |
| | | GGAAGCACCCTAGAGAGGCCGGCGATTACAGCGTGTACGAGTT |
| | | CCTGTCCAAGAAAGAGAACCACTTCATCTGGCGGAATCACCCTG |
| | | AGTACCCCTACCTGTACGCCACCTTCTGCGAGATCGACAAGAAA |
| | | AAGAAGGACGCCAAGCAGCAGGCCACCTTCACACTGGCCGATC |
| | | CTATCAATCACCCTCTGTGGGTCCGATTCGAGGAAAGAAGCGGC |
| | | AGCAACCTGAACAAGTACAGAATCCTGACCGAGCAGCTGCACAC |
| | | CGAGAAGCTGAAGAAAAAGCTGACAGTGCAGCTGGACCGGCTG |
| | | ATCTACCCTACAGAATCTGGCGGCTGGGAAGAGAAGGGCAAAG |
| | | TGGACATTGTGCTGCTGCCCAGCCGGCAGTTCTACAACCAGATC |
| | | TTCCTGGACATCGAGGAAAAGGGCAAGCACGCCTTCACCTACAA |
| | | GGATGAGAGCATCAAGTTCCCTCTGAAGGGCACACTCGGCGGA |
| | | GCCAGAGTGCAGTTCGACAGAGATCACCTGAGAAGATACCCTCA |
| | | CAAGGTGGAAAGCGGCAACGTGGGCAGAATCTACTTCAACATG |
| | | ACCGTGAACATCGAGCCTACAGAGTCCCCAGTGTCCAAGTCTCT |
| | | GAAGATCCACCGGGACGACTTCCCCAAGGTGGTCAACTTCAAG |
| | | CCCAAAGAACTGACCGAGTGGATCAAGGACAGCAAGGGCAAGA |
| | | AACTGAAGTCCGGCATCGAGTCCCTGGAAATCGGCCTGAGAGT |
| | | GATGAGCATCGACCTGGGACAGAGACAGGCCGCTGCCGCCTCT |
| | | ATTTTCGAGGTGGTGGATCAGAAGCCCGACATCGAAGGCAAGC |
| | | TGTTTTTCCCAATCAAGGGCACCGAGCTGTATGCCGTGCACAGA |
| | | GCCAGCTTCAACATCAAGCTGCCCGGCGAGACACTGGTCAAGA |
| | | GCAGAGAAGTGCTGCGGAAGGCCAGAGAGGACAATCTGAAACT |
| | | GATGAACCAGAAGCTCAACTTCCTGCGGAACGTGCTGCACTTCC |
| | | AGCAGTTCGAGGACATCACCGAGAGAGAGAAGCGGGTCACCAA |
| | | GTGGATCAGCAGACAAGAGAACAGCGACGTGCCCCTGGTGTAC |
| | | CAGGATGAGCTGATCCAGATCCGCGAGCTGATGTACAAGCCTTA |
| | | CAAGGACTGGGTCGCCTTCCTGAAGCAGCTCCACAAGAGACTG |
| | | GAAGTCGAGATCGGCAAAGAAGTGAAGCACTGGCGGAAGTCCC |
| | | TGAGCGACGGAAGAAAGGGCCTGTACGGCATCTCCCTGAAGAA |
| | | CATCGACGAGATCGATCGGACCCGGAAGTTCCTGCTGAGATGG |
| | | TCCCTGAGGCCTACCGAACCTGGCGAAGTGCGTAGACTGGAAC |
| | | CCGGCCAGAGATTCGCCATCGACCAGCTGAATCACCTGAACGC |
| | | CCTGAAAGAAGATCGGCTGAAGAAGATGGCCAACACCATCATCA |
| | | TGCACGCCCTGGGCTACTGCTACGACGTGCGGAAGAAGAAATG |
| | | GCAGGCTAAGAACCCCGCCTGCCAGATCATCCTGTTCGAGGAT |
| | | CTGAGCAACTACAACCCCTACGAGGAAAGGTCCCGCTTCGAGA |
| | | ACAGCAAGCTCATGAAGTGGTCCAGACGCGAGATCCCCAGACA |
| | | GGTTGCACTGCAGGGCGAGATCTATGGCCTGCAAGTGGGAGAA |
| | | GTGGGCGCTCAGTTCAGCAGCAGATTCCACGCCAAGACAGGCA |
| | | GCCCTGGCATCAGATGTAGCGTCGTGACCAAAGAGAAGCTGCA |
| | | GGACAATCGGTTCTTCAAGAATCTGCAGAGAGAGGGCAGACTG |
| | | ACCCTGGACAAAATCGCCGTGCTGAAAGAGGGCGATCTGTACC |
| | | CAGACAAAGGCGGCGAGAAGTTCATCAGCCTGAGCAAGGATCG |
| | | GAAGTGCGTGACCACACACGCCGACATCAACGCCGCTCAGAAC |
| | | CTGCAGAAGCGGTTCTGGACAAGAACCCACGGCTTCTACAAGG |
| | | TGTACTGCAAGGCCTACCAGGTGGACGGCCAGACCGTGTACAT |
| | | CCCTGAGAGCAAGGACCAGAAGCAGAAGATCATCGAAGAGTTC |
| | | GGCGAGGGCTACTTCATTCTGAAGGACGGGGTGTACGAATGGG |
| | | TCAACGCCGGCAAGCTGAAAATCAAGAAGGGCAGCTCCAAGCA |
| | | GAGCAGCAGCGAGCTGGTGGATAGCGACATCCTGAAAGACAGC |
| | | TTCGACCTGGCCTCCGAGCTGAAAGGCGAAAAGCTGATGCTGT |
| | | ACAGGGACCCCAGCGGCAATGTGTTCCCCAGCGACAAATGGAT |
| | | GGCCGCTGGCGTGTTCTTCGGAAAGCTGGAACGCATCCTGATC |
| | | AGCAAGCTGACCAACCAGTACTCCATCAGCACCATCGAGGACG |
| | | ACAGCAGCAAGCAGTCTATGAAAAGGCCGGCGGCCACGAAAAA |
| | | GGCCGGCCAGGCAAAAAAGAAAAAGGGATCCTACCCATACGAT |
| | | GTTCCAGATTACGCTTATCCCTACGACGTGCCTGATTATGCATAC |
| | | CCATATGATGTCCCCGACTATGCCTAA |
| BhCas12b | 277 | MAPKKKRKVGIHGVPAAATRSFILKIEPNEEVKKGLWKTHEVLNHGI |
| GGSGGS-ABE8- | | AYYMNILKLIRQEAIYEHHEQDPKNPKKVSKAEIQAELWDFVLKMQK |
| Xten20 at K255 | | CNSFTHEVDKDEVFNILRELYEELVPSSVEKKGEANQLSNKFLYPLV |
| polypeptide | | DPNSQSGKGTASSGRKPRWYNLKIAGDPSWEEEKKKWEEDKKKD |
| | | PLAKILGKLAEYGLIPLFIPYTDSNEPIVKEIKWMEKSRNQSVRRLDK |
| | | DMFIQALERFLSWESWNLKVKEEYEKVEKEYKTLEERIKGGSGGSS |
| | | EVEFSHEYWMRHALTLAKRARDEREVPVGAVLVLNNRVIGEGWNR |
| | | AIGLHDPTAHAEIMALRQGGLVMQNYRLYDATLYVTFEPCVMCAGA |
| | | MIHSRIGRVVFGVRNAKTGAAGSLMDVLHHPGMNHRVEITEGILAD |
| | | ECAALLCRFFRMPRRVFNAQKKAQSSTDGSSGSETPGTSESATPE |
| | | SSGEDIQALKALEQYEKERQEQLLRDTLNTNEYRLSKRGLRGWREI |
| | | IQKWLKMDENEPSEKYLEVFKDYQRKHPREAGDYSVYEFLSKKEN |
| | | HFIWRNHPEYPYLYATFCEIDKKKKDAKQQATFTLADPINHPLWVRF |
| | | EERSGSNLNKYRILTEQLHTEKLKKKLTVQLDRLIYPTESGGWEEK |
| | | GKVDIVLLPSRQFYNQIFLDIEEKGKHAFTYKDESIKFPLKGTLGGAR |
| | | VQFDRDHLRRYPHKVESGNVGRIYFNMTVNIEPTESPVSKSLKIHR |
| | | DDFPKWNFKPKELTEWIKDSKGKKLKSGIESLEIGLRVMSIDLGQR |
| | | QAAAASIFEVVDQKPDIEGKLFFPIKGTELYAVHRASFNIKLPGETLV |
| | | KSREVLRKAREDNLKLMNQKLNFLRNVLHFQQFEDITEREKRVTKW |
| | | ISRQENSDVPLVYQDELIQIRELMYKPYKDWVAFLKQLHKRLEVEIG |
| | | KEVKHWRKSLSDGRKGLYGISLKNIDEIDRTRKFLLRWSLRPTEPG |
| | | EVRRLEPGQRFAIDQLNHLNALKEDRLKKMANTIIMHALGYCYDVR |
| | | KKKWQAKNPACQIILFEDLSNYNPYEERSRFENSKLMKWSRREIPR |
| | | QVALQGEIYGLQVGEVGAQFSSRFHAKTGSPGIRCSVVTKEKLQD |
| | | NRFFKNLQREGRLTLDKIAVLKEGDLYPDKGGEKFISLSKDRKCVTT |
| | | HADINAAQNLQKRFWTRTHGFYKVYCKAYQVDGQTVYIPESKDQK |
| | | QKIIEEFGEGYFILKDGVYEWVNAGKLKIKKGSSKQSSSELVDSDILK |
| | | DSFDLASELKGEKLMLYRDPSGNVFPSDKWMAAGVFFGKLERILIS |
| | | KLTNQYSISTIEDDSSKQSMKRPAATKKAGQAKKKKGSYPYDVPDY |
| | | AYPYDVPDYAYPYDVPDYA |
| BhCas12b | 278 | GCCACCATGGCCCCAAAGAAGAAGCGGAAGGTCGGTATCCACG |
| GGSGGS-ABE8- | | GAGTCCCAGCAGCCGCCACCAGATCCTTCATCCTGAAGATCGA |
| Xten20 at D306 | | GCCCAACGAGGAAGTGAAGAAAGGCCTCTGGAAAACCCACGAG |
| polynucleotide | | GTGCTGAACCACGGAATCGCCTACTACATGAATATCCTGAAGCT |
| | | GATCCGGCAAGAGGCCATCTACGAGCACCACGAGCAGGACCCC |
| | | AAGAATCCCAAGAAGGTGTCCAAGGCCGAGATCCAGGCCGAGC |
| | | TGTGGGATTTCGTGCTGAAGATGCAGAAGTGCAACAGCTTCACA |
| | | CACGAGGTGGACAAGGACGAGGTGTTCAACATCCTGAGAGAGC |
| | | TGTACGAGGAACTGGTGCCCAGCAGCGTGGAAAAGAAGGGCGA |
| | | AGCCAACCAGCTGAGCAACAAGTTTCTGTACCCTCTGGTGGACC |
| | | CCAACAGCCAGTCTGGAAAGGGAACAGCCAGCAGCGGCAGAAA |
| | | GCCCAGATGGTACAACCTGAAGATTGCCGGCGATCCCTCCTGG |
| | | GAAGAAGAGAAGAAGAAGTGGGAAGAAGATAAGAAAAAGGACC |
| | | CGCTGGCCAAGATCCTGGGCAAGCTGGCTGAGTACGGACTGAT |
| | | CCCTCTGTTCATCCCCTACACCGACAGCAACGAGCCCATCGTGA |
| | | AAGAAATCAAGTGGATGGAAAAGTCCCGGAACCAGAGCGTGCG |
| | | GCGGCTGGATAAGGACATGTTCATTCAGGCCCTGGAACGGTTC |
| | | CTGAGCTGGGAGAGCTGGAACCTGAAAGTGAAAGAGGAATACG |
| | | AGAAGGTCGAGAAAGAGTACAAGACCCTGGAAGAGAGGATCAA |
| | | AGAGGACATCCAGGCTCTGAAGGCTCTGGAACAGTATGAGAAA |
| | | GAGCGGCAAGAACAGCTGCTGCGGGACACCCTGAACACCAACG |
| | | AGTACCGGCTGAGCAAGAGAGGCCTTAGAGGCTGGCGGGAAAT |
| | | CATCCAGAAATGGCTGAAAATGGACGGAGGCTCTGGAGGAAGC |
| | | TCCGAAGTCGAGTTTTCCCATGAGTACTGGATGAGACACGCATT |
| | | GACTCTCGCAAAGAGGGCTCGAGATGAACGCGAGGTGCCCGTG |
| | | GGGGCAGTACTCGTGCTCAACAATCGCGTAATCGGCGAAGGTT |
| | | GGAATAGGGCAATCGGACTCCACGACCCCACTGCACATGCGGA |
| | | AATCATGGCCCTTCGACAGGGAGGGCTTGTGATGCAGAATTATC |
| | | GACTTTATGATGCGACGCTGTACGTCACGTTTGAACCTTGCGTA |
| | | ATGTGCGCGGGAGCTATGATTCACTCCCGCATTGGACGAGTTGT |
| | | ATTCGGTGTTCGCAACGCCAAGACGGGTGCCGCAGGTTCACTG |
| | | ATGGACGTGCTGCATCATCCAGGCATGAACCACCGGGTAGAAAT |
| | | CACAGAAGGCATATTGGCGGACGAATGTGCGGCGCTGTTGTGT |
| | | CGTTTTTTTCGCATGCCCAGGCGGGTCTTTAACGCCCAGAAAAA |
| | | AGCACAATCCTCTACTGACGGCTCTTCTGGATCTGAAACACCTG |
| | | GCACAAGCGAGAGCGCCACCCCTGAGAGCTCTGGCGAGAACGA |
| | | GCCCTCCGAGAAGTACCTGGAAGTGTTCAAGGACTACCAGCGG |
| | | AAGCACCCTAGAGAGGCCGGCGATTACAGCGTGTACGAGTTCC |
| | | TGTCCAAGAAAGAGAACCACTTCATCTGGCGGAATCACCCTGAG |
| | | TACCCCTACCTGTACGCCACCTTCTGCGAGATCGACAAGAAAAA |
| | | GAAGGACGCCAAGCAGCAGGCCACCTTCACACTGGCCGATCCT |
| | | ATCAATCACCCTCTGTGGGTCCGATTCGAGGAAAGAAGCGGCA |
| | | GCAACCTGAACAAGTACAGAATCCTGACCGAGCAGCTGCACAC |
| | | CGAGAAGCTGAAGAAAAAGCTGACAGTGCAGCTGGACCGGCTG |
| | | ATCTACCCTACAGAATCTGGCGGCTGGGAAGAGAAGGGCAAAG |
| | | TGGACATTGTGCTGCTGCCCAGCCGGCAGTTCTACAACCAGATC |
| | | TTCCTGGACATCGAGGAAAAGGGCAAGCACGCCTTCACCTACAA |
| | | GGATGAGAGCATCAAGTTCCCTCTGAAGGGCACACTCGGCGGA |
| | | GCCAGAGTGCAGTTCGACAGAGATCACCTGAGAAGATACCCTCA |
| | | CAAGGTGGAAAGCGGCAACGTGGGCAGAATCTACTTCAACATG |
| | | ACCGTGAACATCGAGCCTACAGAGTCCCCAGTGTCCAAGTCTCT |
| | | GAAGATCCACCGGGACGACTTCCCCAAGGTGGTCAACTTCAAG |
| | | CCCAAAGAACTGACCGAGTGGATCAAGGACAGCAAGGGCAAGA |
| | | AACTGAAGTCCGGCATCGAGTCCCTGGAAATCGGCCTGAGAGT |
| | | GATGAGCATCGACCTGGGACAGAGACAGGCCGCTGCCGCCTCT |
| | | ATTTTCGAGGTGGTGGATCAGAAGCCCGACATCGAAGGCAAGC |
| | | TGTTTTTCCCAATCAAGGGCACCGAGCTGTATGCCGTGCACAGA |
| | | GCCAGCTTCAACATCAAGCTGCCCGGCGAGACACTGGTCAAGA |
| | | GCAGAGAAGTGCTGCGGAAGGCCAGAGAGGACAATCTGAAACT |
| | | GATGAACCAGAAGCTCAACTTCCTGCGGAACGTGCTGCACTTCC |
| | | AGCAGTTCGAGGACATCACCGAGAGAGAGAAGCGGGTCACCAA |
| | | GTGGATCAGCAGACAAGAGAACAGCGACGTGCCCCTGGTGTAC |
| | | CAGGATGAGCTGATCCAGATCCGCGAGCTGATGTACAAGCCTTA |
| | | CAAGGACTGGGTCGCCTTCCTGAAGCAGCTCCACAAGAGACTG |
| | | GAAGTCGAGATCGGCAAAGAAGTGAAGCACTGGCGGAAGTCCC |
| | | TGAGCGACGGAAGAAAGGGCCTGTACGGCATCTCCCTGAAGAA |
| | | CATCGACGAGATCGATCGGACCCGGAAGTTCCTGCTGAGATGG |
| | | TCCCTGAGGCCTACCGAACCTGGCGAAGTGCGTAGACTGGAAC |
| | | CCGGCCAGAGATTCGCCATCGACCAGCTGAATCACCTGAACGC |
| | | CCTGAAAGAAGATCGGCTGAAGAAGATGGCCAACACCATCATCA |
| | | TGCACGCCCTGGGCTACTGCTACGACGTGCGGAAGAAGAAATG |
| | | GCAGGCTAAGAACCCCGCCTGCCAGATCATCCTGTTCGAGGAT |
| | | CTGAGCAACTACAACCCCTACGAGGAAAGGTCCCGCTTCGAGA |
| | | ACAGCAAGCTCATGAAGTGGTCCAGACGCGAGATCCCCAGACA |
| | | GGTTGCACTGCAGGGCGAGATCTATGGCCTGCAAGTGGGAGAA |
| | | GTGGGCGCTCAGTTCAGCAGCAGATTCCACGCCAAGACAGGCA |
| | | GCCCTGGCATCAGATGTAGCGTCGTGACCAAAGAGAAGCTGCA |
| | | GGACAATCGGTTCTTCAAGAATCTGCAGAGAGAGGGCAGACTG |
| | | ACCCTGGACAAAATCGCCGTGCTGAAAGAGGGCGATCTGTACC |
| | | CAGACAAAGGCGGCGAGAAGTTCATCAGCCTGAGCAAGGATCG |
| | | GAAGTGCGTGACCACACACGCCGACATCAACGCCGCTCAGAAC |
| | | CTGCAGAAGCGGTTCTGGACAAGAACCCACGGCTTCTACAAGG |
| | | TGTACTGCAAGGCCTACCAGGTGGACGGCCAGACCGTGTACAT |
| | | CCCTGAGAGCAAGGACCAGAAGCAGAAGATCATCGAAGAGTTC |
| | | GGCGAGGGCTACTTCATTCTGAAGGACGGGGTGTACGAATGGG |
| | | TCAACGCCGGCAAGCTGAAAATCAAGAAGGGCAGCTCCAAGCA |
| | | GAGCAGCAGCGAGCTGGTGGATAGCGACATCCTGAAAGACAGC |
| | | TTCGACCTGGCCTCCGAGCTGAAAGGCGAAAAGCTGATGCTGT |
| | | ACAGGGACCCCAGCGGCAATGTGTTCCCCAGCGACAAATGGAT |
| | | GGCCGCTGGCGTGTTCTTCGGAAAGCTGGAACGCATCCTGATC |
| | | AGCAAGCTGACCAACCAGTACTCCATCAGCACCATCGAGGACG |
| | | ACAGCAGCAAGCAGTCTATGAAAAGGCCGGCGGCCACGAAAAA |
| | | GGCCGGCCAGGCAAAAAAGAAAAAGGGATCCTACCCATACGAT |
| | | GTTCCAGATTACGCTTATCCCTACGACGTGCCTGATTATGCATAC |
| | | CCATATGATGTCCCCGACTATGCCTAA |
| BhCas12b | 279 | MAPKKKRKVGIHGVPAAATRSFILKIEPNEEVKKGLWKTHEVLNHGI |
| GGSGGS-ABE8- | | AYYMNILKLIRQEAIYEHHEQDPKNPKKVSKAEIQAELWDFVLKMQK |
| Xten20 at D306 | | CNSFTHEVDKDEVFNILRELYEELVPSSVEKKGEANQLSNKFLYPLV |
| polypeptide | | DPNSQSGKGTASSGRKPRWYNLKIAGDPSWEEEKKKWEEDKKKD |
| | | PLAKILGKLAEYGLIPLFIPYTDSNEPIVKEIKWMEKSRNQSVRRLDK |
| | | DMFIQALERFLSWESWNLKVKEEYEKVEKEYKTLEERIKEDIQALKA |
| | | LEQYEKERQEQLLRDTLNTNEYRLSKRGLRGWREIIQKWLKMDGG |
| | | SGGSSEVEFSHEYWMRHALTLAKRARDEREVPVGAVLVLNNRVIG |
| | | EGWNRAIGLHDPTAHAEIMALRQGGLVMQNYRLYDATLYVTFEPC |
| | | VMCAGAMIHSRIGRVVFGVRNAKTGAAGSLMDVLHHPGMNHRVEI |
| | | TEGILADECAALLCRFFRMPRRVFNAQKKAQSSTDGSSGSETPGT |
| | | SESATPESSGENEPSEKYLEVFKDYQRKHPREAGDYSVYEFLSKK |
| | | ENHFIWRNHPEYPYLYATFCEIDKKKKDAKQQATFTLADPINHPLW |
| | | VRFEERSGSNLNKYRILTEQLHTEKLKKKLTVQLDRLIYPTESGGWE |
| | | EKGKVDIVLLPSRQFYNQIFLDIEEKGKHAFTYKDESIKFPLKGTLGG |
| | | ARVQFDRDHLRRYPHKVESGNVGRIYFNMTVNIEPTESPVSKSLKI |
| | | HRDDFPKVVNFKPKELTEWIKDSKGKKLKSGIESLEIGLRVMSIDLG |
| | | QRQAAAASIFEVVDQKPDIEGKLFFPIKGTELYAVHRASFNIKLPGET |
| | | LVKSREVLRKAREDNLKLMNQKLNFLRNVLHFQQFEDITEREKRVT |
| | | KWISRQENSDVPLVYQDELIQIRELMYKPYKDWVAFLKQLHKRLEV |
| | | EIGKEVKHWRKSLSDGRKGLYGISLKNIDEIDRTRKFLLRWSLRPTE |
| | | PGEVRRLEPGQRFAIDQLNHLNALKEDRLKKMANTIIMHALGYCYD |
| | | VRKKKWQAKNPACQIILFEDLSNYNPYEERSRFENSKLMKWSRREI |
| | | PRQVALQGEIYGLQVGEVGAQFSSRFHAKTGSPGIRCSVVTKEKLQ |
| | | DNRFFKNLQREGRLTLDKIAVLKEGDLYPDKGGEKFISLSKDRKCVT |
| | | THADINAAQNLQKRFWTRTHGFYKVYCKAYQVDGQTVYIPESKDQ |
| | | KQKIIEEFGEGYFILKDGVYEWVNAGKLKIKKGSSKQSSSELVDSDIL |
| | | KDSFDLASELKGEKLMLYRDPSGNVFPSDKWMAAGVFFGKLERILI |
| | | SKLTNQYSISTIEDDSSKQSMKRPAATKKAGQAKKKKGSYPYDVPD |
| | | YAYPYDVPDYAYPYDVPDYA |
| BhCas12b | 280 | GCCACCATGGCCCCAAAGAAGAAGCGGAAGGTCGGTATCCACG |
| GGSGGS-ABE8- | | GAGTCCCAGCAGCCGCCACCAGATCCTTCATCCTGAAGATCGA |
| Xten20 at D980 | | GCCCAACGAGGAAGTGAAGAAAGGCCTCTGGAAAACCCACGAG |
| polynucleotide | | GTGCTGAACCACGGAATCGCCTACTACATGAATATCCTGAAGCT |
| | | GATCCGGCAAGAGGCCATCTACGAGCACCACGAGCAGGACCCC |
| | | AAGAATCCCAAGAAGGTGTCCAAGGCCGAGATCCAGGCCGAGC |
| | | TGTGGGATTTCGTGCTGAAGATGCAGAAGTGCAACAGCTTCACA |
| | | CACGAGGTGGACAAGGACGAGGTGTTCAACATCCTGAGAGAGC |
| | | TGTACGAGGAACTGGTGCCCAGCAGCGTGGAAAAGAAGGGCGA |
| | | AGCCAACCAGCTGAGCAACAAGTTTCTGTACCCTCTGGTGGACC |
| | | CCAACAGCCAGTCTGGAAAGGGAACAGCCAGCAGCGGCAGAAA |
| | | GCCCAGATGGTACAACCTGAAGATTGCCGGCGATCCCTCCTGG |
| | | GAAGAAGAGAAGAAGAAGTGGGAAGAAGATAAGAAAAAGGACC |
| | | CGCTGGCCAAGATCCTGGGCAAGCTGGCTGAGTACGGACTGAT |
| | | CCCTCTGTTCATCCCCTACACCGACAGCAACGAGCCCATCGTGA |
| | | AAGAAATCAAGTGGATGGAAAAGTCCCGGAACCAGAGCGTGCG |
| | | GCGGCTGGATAAGGACATGTTCATTCAGGCCCTGGAACGGTTC |
| | | CTGAGCTGGGAGAGCTGGAACCTGAAAGTGAAAGAGGAATACG |
| | | AGAAGGTCGAGAAAGAGTACAAGACCCTGGAAGAGAGGATCAA |
| | | AGAGGACATCCAGGCTCTGAAGGCTCTGGAACAGTATGAGAAA |
| | | GAGCGGCAAGAACAGCTGCTGCGGGACACCCTGAACACCAACG |
| | | AGTACCGGCTGAGCAAGAGAGGCCTTAGAGGCTGGCGGGAAAT |
| | | CATCCAGAAATGGCTGAAAATGGACGAGAACGAGCCCTCCGAG |
| | | AAGTACCTGGAAGTGTTCAAGGACTACCAGCGGAAGCACCCTA |
| | | GAGAGGCCGGCGATTACAGCGTGTACGAGTTCCTGTCCAAGAA |
| | | AGAGAACCACTTCATCTGGCGGAATCACCCTGAGTACCCCTACC |
| | | TGTACGCCACCTTCTGCGAGATCGACAAGAAAAAGAAGGACGC |
| | | CAAGCAGCAGGCCACCTTCACACTGGCCGATCCTATCAATCACC |
| | | CTCTGTGGGTCCGATTCGAGGAAAGAAGCGGCAGCAACCTGAA |
| | | CAAGTACAGAATCCTGACCGAGCAGCTGCACACCGAGAAGCTG |
| | | AAGAAAAAGCTGACAGTGCAGCTGGACCGGCTGATCTACCCTAC |
| | | AGAATCTGGCGGCTGGGAAGAGAAGGGCAAAGTGGACATTGTG |
| | | CTGCTGCCCAGCCGGCAGTTCTACAACCAGATCTTCCTGGACAT |
| | | CGAGGAAAAGGGCAAGCACGCCTTCACCTACAAGGATGAGAGC |
| | | ATCAAGTTCCCTCTGAAGGGCACACTCGGCGGAGCCAGAGTGC |
| | | AGTTCGACAGAGATCACCTGAGAAGATACCCTCACAAGGTGGAA |
| | | AGCGGCAACGTGGGCAGAATCTACTTCAACATGACCGTGAACAT |
| | | CGAGCCTACAGAGTCCCCAGTGTCCAAGTCTCTGAAGATCCACC |
| | | GGGACGACTTCCCCAAGGTGGTCAACTTCAAGCCCAAAGAACT |
| | | GACCGAGTGGATCAAGGACAGCAAGGGCAAGAAACTGAAGTCC |
| | | GGCATCGAGTCCCTGGAAATCGGCCTGAGAGTGATGAGCATCG |
| | | ACCTGGGACAGAGACAGGCCGCTGCCGCCTCTATTTTCGAGGT |
| | | GGTGGATCAGAAGCCCGACATCGAAGGCAAGCTGTTTTTCCCAA |
| | | TCAAGGGCACCGAGCTGTATGCCGTGCACAGAGCCAGCTTCAA |
| | | CATCAAGCTGCCCGGCGAGACACTGGTCAAGAGCAGAGAAGTG |
| | | CTGCGGAAGGCCAGAGAGGACAATCTGAAACTGATGAACCAGA |
| | | AGCTCAACTTCCTGCGGAACGTGCTGCACTTCCAGCAGTTCGAG |
| | | GACATCACCGAGAGAGAGAAGCGGGTCACCAAGTGGATCAGCA |
| | | GACAAGAGAACAGCGACGTGCCCCTGGTGTACCAGGATGAGCT |
| | | GATCCAGATCCGCGAGCTGATGTACAAGCCTTACAAGGACTGG |
| | | GTCGCCTTCCTGAAGCAGCTCCACAAGAGACTGGAAGTCGAGA |
| | | TCGGCAAAGAAGTGAAGCACTGGCGGAAGTCCCTGAGCGACGG |
| | | AAGAAAGGGCCTGTACGGCATCTCCCTGAAGAACATCGACGAG |
| | | ATCGATCGGACCCGGAAGTTCCTGCTGAGATGGTCCCTGAGGC |
| | | CTACCGAACCTGGCGAAGTGCGTAGACTGGAACCCGGCCAGAG |
| | | ATTCGCCATCGACCAGCTGAATCACCTGAACGCCCTGAAAGAAG |
| | | ATCGGCTGAAGAAGATGGCCAACACCATCATCATGCACGCCCTG |
| | | GGCTACTGCTACGACGTGCGGAAGAAGAAATGGCAGGCTAAGA |
| | | ACCCCGCCTGCCAGATCATCCTGTTCGAGGATCTGAGCAACTAC |
| | | AACCCCTACGAGGAAAGGTCCCGCTTCGAGAACAGCAAGCTCA |
| | | TGAAGTGGTCCAGACGCGAGATCCCCAGACAGGTTGCACTGCA |
| | | GGGCGAGATCTATGGCCTGCAAGTGGGAGAAGTGGGCGCTCAG |
| | | TTCAGCAGCAGATTCCACGCCAAGACAGGCAGCCCTGGCATCA |
| | | GATGTAGCGTCGTGACCAAAGAGAAGCTGCAGGACAATCGGTT |
| | | CTTCAAGAATCTGCAGAGAGAGGGCAGACTGACCCTGGACAAA |
| | | ATCGCCGTGCTGAAAGAGGGCGATCTGTACCCAGACAAAGGCG |
| | | GCGAGAAGTTCATCAGCCTGAGCAAGGATCGGAAGTGCGTGAC |
| | | CACACACGCCGACATCAACGCCGCTCAGAACCTGCAGAAGCGG |
| | | TTCTGGACAAGAACCCACGGCTTCTACAAGGTGTACTGCAAGGC |
| | | CTACCAGGTGGACGGAGGCTCTGGAGGAAGCTCCGAAGTCGAG |
| | | TTTTCCCATGAGTACTGGATGAGACACGCATTGACTCTCGCAAA |
| | | GAGGGCTCGAGATGAACGCGAGGTGCCCGTGGGGGCAGTACT |
| | | CGTGCTCAACAATCGCGTAATCGGCGAAGGTTGGAATAGGGCA |
| | | ATCGGACTCCACGACCCCACTGCACATGCGGAAATCATGGCCC |
| | | TTCGACAGGGAGGGCTTGTGATGCAGAATTATCGACTTTATGAT |
| | | GCGACGCTGTACGTCACGTTTGAACCTTGCGTAATGTGCGCGG |
| | | GAGCTATGATTCACTCCCGCATTGGACGAGTTGTATTCGGTGTT |
| | | CGCAACGCCAAGACGGGTGCCGCAGGTTCACTGATGGACGTGC |
| | | TGCATCATCCAGGCATGAACCACCGGGTAGAAATCACAGAAGG |
| | | CATATTGGCGGACGAATGTGCGGCGCTGTTGTGTCGTTTTTTTC |
| | | GCATGCCCAGGCGGGTCTTTAACGCCCAGAAAAAAGCACAATC |
| | | CTCTACTGACGGCTCTTCTGGATCTGAAACACCTGGCACAAGCG |
| | | AGAGCGCCACCCCTGAGAGCTCTGGCGGCCAGACCGTGTACAT |
| | | CCCTGAGAGCAAGGACCAGAAGCAGAAGATCATCGAAGAGTTC |
| | | GGCGAGGGCTACTTCATTCTGAAGGACGGGGTGTACGAATGGG |
| | | TCAACGCCGGCAAGCTGAAAATCAAGAAGGGCAGCTCCAAGCA |
| | | GAGCAGCAGCGAGCTGGTGGATAGCGACATCCTGAAAGACAGC |
| | | TTCGACCTGGCCTCCGAGCTGAAAGGCGAAAAGCTGATGCTGT |
| | | ACAGGGACCCCAGCGGCAATGTGTTCCCCAGCGACAAATGGAT |
| | | GGCCGCTGGCGTGTTCTTCGGAAAGCTGGAACGCATCCTGATC |
| | | AGCAAGCTGACCAACCAGTACTCCATCAGCACCATCGAGGACG |
| | | ACAGCAGCAAGCAGTCTATGAAAAGGCCGGCGGCCACGAAAAA |
| | | GGCCGGCCAGGCAAAAAAGAAAAAGGGATCCTACCCATACGAT |
| | | GTTCCAGATTACGCTTATCCCTACGACGTGCCTGATTATGCATAC |
| | | CCATATGATGTCCCCGACTATGCCTAA |
| BhCas12b | 281 | MAPKKKRKVGIHGVPAAATRSFILKIEPNEEVKKGLWKTHEVLNHGI |
| GGSGGS-ABE8- | | AYYMNILKLIRQEAIYEHHEQDPKNPKKVSKAEIQAELWDFVLKMQK |
| Xten20 at D980 | | CNSFTHEVDKDEVFNILRELYEELVPSSVEKKGEANQLSNKFLYPLV |
| polypeptide | | DPNSQSGKGTASSGRKPRWYNLKIAGDPSWEEEKKKWEEDKKKD |
| | | PLAKILGKLAEYGLIPLFIPYTDSNEPIVKEIKWMEKSRNQSVRRLDK |
| | | DMFIQALERFLSWESWNLKVKEEYEKVEKEYKTLEERIKEDIQALKA |
| | | LEQYEKERQEQLLRDTLNTNEYRLSKRGLRGWREIIQKWLKMDEN |
| | | EPSEKYLEVFKDYQRKHPREAGDYSVYEFLSKKENHFIWRNHPEY |
| | | PYLYATFCEIDKKKKDAKQQATFTLADPINHPLWVRFEERSGSNLN |
| | | KYRILTEQLHTEKLKKKLTVQLDRLIYPTESGGWEEKGKVDIVLLPS |
| | | RQFYNQIFLDIEEKGKHAFTYKDESIKFPLKGTLGGARVQFDRDHLR |
| | | RYPHKVESGNVGRIYFNMTVNIEPTESPVSKSLKIHRDDFPKVVNFK |
| | | PKELTEWIKDSKGKKLKSGIESLEIGLRVMSIDLGQRQAAAASIFEW |
| | | DQKPDIEGKLFFPIKGTELYAVHRASFNIKLPGETLVKSREVLRKAR |
| | | EDNLKLMNQKLNFLRNVLHFQQFEDITEREKRVTKWISRQENSDVP |
| | | LVYQDELIQIRELMYKPYKDWVAFLKQLHKRLEVEIGKEVKHWRKS |
| | | LSDGRKGLYGISLKNIDEIDRTRKFLLRWSLRPTEPGEVRRLEPGQR |
| | | FAIDQLNHLNALKEDRLKKMANTIIMHALGYCYDVRKKKWQAKNPA |
| | | CQIILFEDLSNYNPYEERSRFENSKLMKWSRREIPRQVALQGEIYGL |
| | | QVGEVGAQFSSRFHAKTGSPGIRCSVVTKEKLQDNRFFKNLQREG |
| | | RLTLDKIAVLKEGDLYPDKGGEKFISLSKDRKCVTTHADINAAQNLQ |
| | | KRFWTRTHGFYKVYCKAYQVDGGSGGSSEVEFSHEYWMRHALTL |
| | | AKRARDEREVPVGAVLVLNNRVIGEGWNRAIGLHDPTAHAEIMALR |
| | | QGGLVMQNYRLYDATLYVTFEPCVMCAGAMIHSRIGRWFGVRNA |
| | | KTGAAGSLMDVLHHPGMNHRVEITEGILADECAALLCRFFRMPRRV |
| | | FNAQKKAQSSTDGSSGSETPGTSESATPESSGGQTVYIPESKDQK |
| | | QKIIEEFGEGYFILKDGVYEWVNAGKLKIKKGSSKQSSSELVDSDILK |
| | | DSFDLASELKGEKLMLYRDPSGNVFPSDKWMAAGVFFGKLERILIS |
| | | KLTNQYSISTIEDDSSKQSMKRPAATKKAGQAKKKKGSYPYDVPDY |
| | | AYPYDVPDYAYPYDVPDYA |
| BhCas12b | 282 | GCCACCATGGCCCCAAAGAAGAAGCGGAAGGTCGGTATCCACG |
| GGSGGS-ABE8- | | GAGTCCCAGCAGCCGCCACCAGATCCTTCATCCTGAAGATCGA |
| Xten20 at K1019 | | GCCCAACGAGGAAGTGAAGAAAGGCCTCTGGAAAACCCACGAG |
| polynucleotide | | GTGCTGAACCACGGAATCGCCTACTACATGAATATCCTGAAGCT |
| | | GATCCGGCAAGAGGCCATCTACGAGCACCACGAGCAGGACCCC |
| | | AAGAATCCCAAGAAGGTGTCCAAGGCCGAGATCCAGGCCGAGC |
| | | TGTGGGATTTCGTGCTGAAGATGCAGAAGTGCAACAGCTTCACA |
| | | CACGAGGTGGACAAGGACGAGGTGTTCAACATCCTGAGAGAGC |
| | | TGTACGAGGAACTGGTGCCCAGCAGCGTGGAAAAGAAGGGCGA |
| | | AGCCAACCAGCTGAGCAACAAGTTTCTGTACCCTCTGGTGGACC |
| | | CCAACAGCCAGTCTGGAAAGGGAACAGCCAGCAGCGGCAGAAA |
| | | GCCCAGATGGTACAACCTGAAGATTGCCGGCGATCCCTCCTGG |
| | | GAAGAAGAGAAGAAGAAGTGGGAAGAAGATAAGAAAAAGGACC |
| | | CGCTGGCCAAGATCCTGGGCAAGCTGGCTGAGTACGGACTGAT |
| | | CCCTCTGTTCATCCCCTACACCGACAGCAACGAGCCCATCGTGA |
| | | AAGAAATCAAGTGGATGGAAAAGTCCCGGAACCAGAGCGTGCG |
| | | GCGGCTGGATAAGGACATGTTCATTCAGGCCCTGGAACGGTTC |
| | | CTGAGCTGGGAGAGCTGGAACCTGAAAGTGAAAGAGGAATACG |
| | | AGAAGGTCGAGAAAGAGTACAAGACCCTGGAAGAGAGGATCAA |
| | | AGAGGACATCCAGGCTCTGAAGGCTCTGGAACAGTATGAGAAA |
| | | GAGCGGCAAGAACAGCTGCTGCGGGACACCCTGAACACCAACG |
| | | AGTACCGGCTGAGCAAGAGAGGCCTTAGAGGCTGGCGGGAAAT |
| | | CATCCAGAAATGGCTGAAAATGGACGAGAACGAGCCCTCCGAG |
| | | AAGTACCTGGAAGTGTTCAAGGACTACCAGCGGAAGCACCCTA |
| | | GAGAGGCCGGCGATTACAGCGTGTACGAGTTCCTGTCCAAGAA |
| | | AGAGAACCACTTCATCTGGCGGAATCACCCTGAGTACCCCTACC |
| | | TGTACGCCACCTTCTGCGAGATCGACAAGAAAAAGAAGGACGC |
| | | CAAGCAGCAGGCCACCTTCACACTGGCCGATCCTATCAATCACC |
| | | CTCTGTGGGTCCGATTCGAGGAAAGAAGCGGCAGCAACCTGAA |
| | | CAAGTACAGAATCCTGACCGAGCAGCTGCACACCGAGAAGCTG |
| | | AAGAAAAAGCTGACAGTGCAGCTGGACCGGCTGATCTACCCTAC |
| | | AGAATCTGGCGGCTGGGAAGAGAAGGGCAAAGTGGACATTGTG |
| | | CTGCTGCCCAGCCGGCAGTTCTACAACCAGATCTTCCTGGACAT |
| | | CGAGGAAAAGGGCAAGCACGCCTTCACCTACAAGGATGAGAGC |
| | | ATCAAGTTCCCTCTGAAGGGCACACTCGGCGGAGCCAGAGTGC |
| | | AGTTCGACAGAGATCACCTGAGAAGATACCCTCACAAGGTGGAA |
| | | AGCGGCAACGTGGGCAGAATCTACTTCAACATGACCGTGAACAT |
| | | CGAGCCTACAGAGTCCCCAGTGTCCAAGTCTCTGAAGATCCACC |
| | | GGGACGACTTCCCCAAGGTGGTCAACTTCAAGCCCAAAGAACT |
| | | GACCGAGTGGATCAAGGACAGCAAGGGCAAGAAACTGAAGTCC |
| | | GGCATCGAGTCCCTGGAAATCGGCCTGAGAGTGATGAGCATCG |
| | | ACCTGGGACAGAGACAGGCCGCTGCCGCCTCTATTTTCGAGGT |
| | | GGTGGATCAGAAGCCCGACATCGAAGGCAAGCTGTTTTTCCCAA |
| | | TCAAGGGCACCGAGCTGTATGCCGTGCACAGAGCCAGCTTCAA |
| | | CATCAAGCTGCCCGGCGAGACACTGGTCAAGAGCAGAGAAGTG |
| | | CTGCGGAAGGCCAGAGAGGACAATCTGAAACTGATGAACCAGA |
| | | AGCTCAACTTCCTGCGGAACGTGCTGCACTTCCAGCAGTTCGAG |
| | | GACATCACCGAGAGAGAGAAGCGGGTCACCAAGTGGATCAGCA |
| | | GACAAGAGAACAGCGACGTGCCCCTGGTGTACCAGGATGAGCT |
| | | GATCCAGATCCGCGAGCTGATGTACAAGCCTTACAAGGACTGG |
| | | GTCGCCTTCCTGAAGCAGCTCCACAAGAGACTGGAAGTCGAGA |
| | | TCGGCAAAGAAGTGAAGCACTGGCGGAAGTCCCTGAGCGACGG |
| | | AAGAAAGGGCCTGTACGGCATCTCCCTGAAGAACATCGACGAG |
| | | ATCGATCGGACCCGGAAGTTCCTGCTGAGATGGTCCCTGAGGC |
| | | CTACCGAACCTGGCGAAGTGCGTAGACTGGAACCCGGCCAGAG |
| | | ATTCGCCATCGACCAGCTGAATCACCTGAACGCCCTGAAAGAAG |
| | | ATCGGCTGAAGAAGATGGCCAACACCATCATCATGCACGCCCTG |
| | | GGCTACTGCTACGACGTGCGGAAGAAGAAATGGCAGGCTAAGA |
| | | ACCCCGCCTGCCAGATCATCCTGTTCGAGGATCTGAGCAACTAC |
| | | AACCCCTACGAGGAAAGGTCCCGCTTCGAGAACAGCAAGCTCA |
| | | TGAAGTGGTCCAGACGCGAGATCCCCAGACAGGTTGCACTGCA |
| | | GGGCGAGATCTATGGCCTGCAAGTGGGAGAAGTGGGCGCTCAG |
| | | TTCAGCAGCAGATTCCACGCCAAGACAGGCAGCCCTGGCATCA |
| | | GATGTAGCGTCGTGACCAAAGAGAAGCTGCAGGACAATCGGTT |
| | | CTTCAAGAATCTGCAGAGAGAGGGCAGACTGACCCTGGACAAA |
| | | ATCGCCGTGCTGAAAGAGGGCGATCTGTACCCAGACAAAGGCG |
| | | GCGAGAAGTTCATCAGCCTGAGCAAGGATCGGAAGTGCGTGAC |
| | | CACACACGCCGACATCAACGCCGCTCAGAACCTGCAGAAGCGG |
| | | TTCTGGACAAGAACCCACGGCTTCTACAAGGTGTACTGCAAGGC |
| | | CTACCAGGTGGACGGCCAGACCGTGTACATCCCTGAGAGCAAG |
| | | GACCAGAAGCAGAAGATCATCGAAGAGTTCGGCGAGGGCTACT |
| | | TCATTCTGAAGGACGGGGTGTACGAATGGGTCAACGCCGGCAA |
| | | GGGAGGCTCTGGAGGAAGCTCCGAAGTCGAGTTTTCCCATGAG |
| | | TACTGGATGAGACACGCATTGACTCTCGCAAAGAGGGCTCGAG |
| | | ATGAACGCGAGGTGCCCGTGGGGGCAGTACTCGTGCTCAACAA |
| | | TCGCGTAATCGGCGAAGGTTGGAATAGGGCAATCGGACTCCAC |
| | | GACCCCACTGCACATGCGGAAATCATGGCCCTTCGACAGGGAG |
| | | GGCTTGTGATGCAGAATTATCGACTTTATGATGCGACGCTGTAC |
| | | GTCACGTTTGAACCTTGCGTAATGTGCGCGGGAGCTATGATTCA |
| | | CTCCCGCATTGGACGAGTTGTATTCGGTGTTCGCAACGCCAAGA |
| | | CGGGTGCCGCAGGTTCACTGATGGACGTGCTGCATCATCCAGG |
| | | CATGAACCACCGGGTAGAAATCACAGAAGGCATATTGGCGGAC |
| | | GAATGTGCGGCGCTGTTGTGTCGTTTTTTTCGCATGCCCAGGCG |
| | | GGTCTTTAACGCCCAGAAAAAAGCACAATCCTCTACTGACGGCT |
| | | CTTCTGGATCTGAAACACCTGGCACAAGCGAGAGCGCCACCCC |
| | | TGAGAGCTCTGGCCTGAAAATCAAGAAGGGCAGCTCCAAGCAG |
| | | AGCAGCAGCGAGCTGGTGGATAGCGACATCCTGAAAGACAGCT |
| | | TCGACCTGGCCTCCGAGCTGAAAGGCGAAAAGCTGATGCTGTA |
| | | CAGGGACCCCAGCGGCAATGTGTTCCCCAGCGACAAATGGATG |
| | | GCCGCTGGCGTGTTCTTCGGAAAGCTGGAACGCATCCTGATCA |
| | | GCAAGCTGACCAACCAGTACTCCATCAGCACCATCGAGGACGA |
| | | CAGCAGCAAGCAGTCTATGAAAAGGCCGGCGGCCACGAAAAAG |
| | | GCCGGCCAGGCAAAAAAGAAAAAGGGATCCTACCCATACGATG |
| | | TTCCAGATTACGCTTATCCCTACGACGTGCCTGATTATGCATACC |
| | | CATATGATGTCCCCGACTATGCCTAA |
| BhCas12b | 283 | MAPKKKRKVGIHGVPAAATRSFILKIEPNEEVKKGLWKTHEVLNHGI |
| GGSGGS-ABE8- | | AYYMNILKLIRQEAIYEHHEQDPKNPKKVSKAEIQAELWDFVLKMQK |
| Xten20 at K1019 | | CNSFTHEVDKDEVFNILRELYEELVPSSVEKKGEANQLSNKFLYPLV |
| polypeptide | | DPNSQSGKGTASSGRKPRWYNLKIAGDPSWEEEKKKWEEDKKKD |
| | | PLAKILGKLAEYGLIPLFIPYTDSNEPIVKEIKWMEKSRNQSVRRLDK |
| | | DMFIQALERFLSWESWNLKVKEEYEKVEKEYKTLEERIKEDIQALKA |
| | | LEQYEKERQEQLLRDTLNTNEYRLSKRGLRGWREIIQKWLKMDEN |
| | | EPSEKYLEVFKDYQRKHPREAGDYSVYEFLSKKENHFIWRNHPEY |
| | | PYLYATFCEIDKKKKDAKQQATFTLADPINHPLWVRFEERSGSNLN |
| | | KYRILTEQLHTEKLKKKLTVQLDRLIYPTESGGWEEKGKVDIVLLPS |
| | | RQFYNQIFLDIEEKGKHAFTYKDESIKFPLKGTLGGARVQFDRDHLR |
| | | RYPHKVESGNVGRIYFNMTVNIEPTESPVSKSLKIHRDDFPKVVNFK |
| | | PKELTEWIKDSKGKKLKSGIESLEIGLRVMSIDLGQRQAAAASIFEW |
| | | DQKPDIEGKLFFPIKGTELYAVHRASFNIKLPGETLVKSREVLRKAR |
| | | EDNLKLMNQKLNFLRNVLHFQQFEDITEREKRVTKWISRQENSDVP |
| | | LVYQDELIQIRELMYKPYKDWVAFLKQLHKRLEVEIGKEVKHWRKS |
| | | LSDGRKGLYGISLKNIDEIDRTRKFLLRWSLRPTEPGEVRRLEPGQR |
| | | FAIDQLNHLNALKEDRLKKMANTIIMHALGYCYDVRKKKWQAKNPA |
| | | CQIILFEDLSNYNPYEERSRFENSKLMKWSRREIPRQVALQGEIYGL |
| | | QVGEVGAQFSSRFHAKTGSPGIRCSVVTKEKLQDNRFFKNLQREG |
| | | RLTLDKIAVLKEGDLYPDKGGEKFISLSKDRKCVTTHADINAAQNLQ |
| | | KRFWTRTHGFYKVYCKAYQVDGQTVYIPESKDQKQKIIEEFGEGYF |
| | | ILKDGVYEWVNAGKGGSGGSSEVEFSHEYWMRHALTLAKRARDE |
| | | REVPVGAVLVLNNRVIGEGWNRAIGLHDPTAHAEIMALRQGGLVM |
| | | QNYRLYDATLYVTFEPCVMCAGAMIHSRIGRVVFGVRNAKTGAAG |
| | | SLMDVLHHPGMNHRVEITEGILADECAALLCRFFRMPRRVFNAQKK |
| | | AQSSTDGSSGSETPGTSESATPESSGLKIKKGSSKQSSSELVDSDI |
| | | LKDSFDLASELKGEKLMLYRDPSGNVFPSDKWMAAGVFFGKLERIL |
| | | ISKLTNQYSISTIEDDSSKQSMKRPAATKKAGQAKKKKGSYPYDVP |
| | | DYAYPYDVPDYAYPYDVPDYA |
| tr\|A5H718\| | 41 | MTDAEYVRIHEKLDIYTFKKQFFNNKKSVSHRCYVLFELKRRGERR |
| A5H718_PETMA | | ACFWGYAVNKPQSGTERGIHAEIFSIRKVEEYLRDNPGQFTINWYS |
| Cytosine | | SWSPCADCAEKILEWYNQELRGNGHTLKIWACKLYYEKNARNQIG |
| deaminase | | LWNLRDNGVGLNVMVSEHYQCCRKIFIQSSHNQLNENRWLEKTLK |
| OS = Petromyzon | | RAEKRRSELSIMIQVKILHTTKSPAV |
| marinus OX = 7757 | | |
| PE = 2 S V =1 amino | | |
| acid sequence; | | |
| PmCDA1 amino | | |
| acid sequence | | |
| EF094822.1 | 42 | TGACACGACACAGCCGTGTATATGAGGAAGGGTAGCTGGATGG |
| Petromyzon | | GGGGGGGGGGAATACGTTCAGAGAGGACATTAGCGAGCGTCTT |
| marinus isolate | | GTTGGTGGCCTTGAGTCTAGACACCTGCAGACATGACCGACGC |
| PmCDA.21 | | TGAGTACGTGAGAATCCATGAGAAGTTGGACATCTACACGTTTA |
| cytosine | | AGAAACAGTTTTTCAACAACAAAAAATCCGTGTCGCATAGATGCT |
| deaminase mRNA, | | ACGTTCTCTTTGAATTAAAACGACGGGGTGAACGTAGAGCGTGT |
| complete cds; | | TTTTGGGGCTATGCTGTGAATAAACCACAGAGCGGGACAGAACG |
| PmCDA1 amino | | TGGAATTCACGCCGAAATCTTTAGCATTAGAAAAGTCGAAGAATA |
| acid sequence | | CCTGCGCGACAACCCCGGACAATTCACGATAAATTGGTACTCAT |
| | | CCTGGAGTCCTTGTGCAGATTGCGCTGAAAAGATCTTAGAATGG |
| | | TATAACCAGGAGCTGCGGGGGAACGGCCACACTTTGAAAATCT |
| | | GGGCTTGCAAACTCTATTACGAGAAAAATGCGAGGAATCAAATT |
| | | GGGCTGTGGAACCTCAGAGATAACGGGGTTGGGTTGAATGTAA |
| | | TGGTAAGTGAACACTACCAATGTTGCAGGAAAATATTCATCCAAT |
| | | CGTCGCACAATCAATTGAATGAGAATAGATGGCTTGAGAAGACT |
| | | TTGAAGCGAGCTGAAAAACGACGGAGCGAGTTGTCCATTATGAT |
| | | TCAGGTAAAAATACTCCACACCACTAAGAGTCCTGCTGTTTAAGA |
| | | GGCTATGCGGATGGTTTTC |
| tr\|Q6QJ80\| | 43 | MDSLLMNRRKFLYQFKNVRWAKGRRETYLCYVVKRRDSATSFSLD |
| Q6QJ80_HUMAN | | FGYLRNKNGCHVELLFLRYISDWDLDPGRCYRVTWFTSWSPCYDC |
| Activation-induced | | ARHVADFLRGNPNLSLRIFTARLYFCEDRKAEPEGLRRLHRAGVQI |
| cytidine deaminase | | AIMTFKAPV |
| OS = Homo sapiens | | |
| OX = 9606 | | |
| GN = AICDA PE = 2 | | |
| SV = 1; AID amino | | |
| acid sequence | | |
| NG_011588.1: | 44 | AGAGAACCATCATTAATTGAAGTGAGATTTTTCTGGCCTGAGACT |
| 5001-15681 Homo | | TGCAGGGAGGCAAGAAGACACTCTGGACACCACTATGGACAGG |
| sapiens activation | | TAAAGAGGCAGTCTTCTCGTGGGTGATTGCACTGGCCTTCCTCT |
| induced cytidine | | CAGAGCAAATCTGAGTAATGAGACTGGTAGCTATCCCTTTCTCT |
| deaminase | | CATGTAACTGTCTGACTGATAAGATCAGCTTGATCAATATGCATA |
| (AICDA), | | TATATTTTTTGATCTGTCTCCTTTTCTTCTATTCAGATCTTATACG |
| RefSeqGene | | CTGTCAGCCCAATTCTTTCTGTTTCAGACTTCTCTTGATTTCCCT |
| (LRG_17) on | | CTTTTTCATGTGGCAAAAGAAGTAGTGCGTACAATGTACTGATTC |
| chromosome 12; | | GTCCTGAGATTTGTACCATGGTTGAAACTAATTTATGGTAATAAT |
| nucleic acid | | ATTAACATAGCAAATCTTTAGAGACTCAAATCATGAAAAGGTAAT |
| sequence of the | | AGCAGTACTGTACTAAAAACGGTAGTGCTAATTTTCGTAATAATT |
| CDS of human AID | | TTGTAAATATTCAACAGTAAAACAACTTGAAGACACACTTTCCTA |
| | | GGGAGGCGTTACTGAAATAATTTAGCTATAGTAAGAAAATTTGTA |
| | | ATTTTAGAAATGCCAAGCATTCTAAATTAATTGCTTGAAAGTCACT |
| | | ATGATTGTGTCCATTATAAGGAGACAAATTCATTCAAGCAAGTTA |
| | | TTTAATGTTAAAGGCCCAATTGTTAGGCAGTTAATGGCACTTTTA |
| | | CTATTAACTAATCTTTCCATTTGTTCAGACGTAGCTTAACTTACCT |
| | | CTTAGGTGTGAATTTGGTTAAGGTCCTCATAATGTCTTTATGTGC |
| | | AGTTTTTGATAGGTTATTGTCATAGAACTTATTCTATTCCTACATT |
| | | TATGATTACTATGGATGTATGAGAATAACACCTAATCCTTATACTT |
| | | TACCTCAATTTAACTCCTTTATAAAGAACTTACATTACAGAATAAA |
| | | GATTTTTTAAAAATATATTTTTTTGTAGAGACAGGGTCTTAGCCCA |
| | | GCCGAGGCTGGTCTCTAAGTCCTGGCCCAAGCGATCCTCCTGC |
| | | CTGGGCCTCCTAAAGTGCTGGAATTATAGACATGAGCCATCACA |
| | | TCCAATATACAGAATAAAGATTTTTAATGGAGGATTTAATGTTCTT |
| | | CAGAAAATTTTCTTGAGGTCAGACAATGTCAAATGTCTCCTCAGT |
| | | TTACACTGAGATTTTGAAAACAAGTCTGAGCTATAGGTCCTTGTG |
| | | AAGGGTCCATTGGAAATACTTGTTCAAAGTAAAATGGAAAGCAAA |
| | | GGTAAAATCAGCAGTTGAAATTCAGAGAAAGACAGAAAAGGAGA |
| | | AAAGATGAAATTCAACAGGACAGAAGGGAAATATATTATCATTAA |
| | | GGAGGACAGTATCTGTAGAGCTCATTAGTGATGGCAAAATGACT |
| | | TGGTCAGGATTATTTTTAACCCGCTTGTTTCTGGTTTGCACGGCT |
| | | GGGGATGCAGCTAGGGTTCTGCCTCAGGGAGCACAGCTGTCCA |
| | | GAGCAGCTGTCAGCCTGCAAGCCTGAAACACTCCCTCGGTAAA |
| | | GTCCTTCCTACTCAGGACAGAAATGACGAGAACAGGGAGCTGG |
| | | AAACAGGCCCCTAACCAGAGAAGGGAAGTAATGGATCAACAAAG |
| | | TTAACTAGCAGGTCAGGATCACGCAATTCATTTCACTCTGACTG |
| | | GTAACATGTGACAGAAACAGTGTAGGCTTATTGTATTTTCATGTA |
| | | GAGTAGGACCCAAAAATCCACCCAAAGTCCTTTATCTATGCCAC |
| | | ATCCTTCTTATCTATACTTCCAGGACACTTTTTCTTCCTTATGATA |
| | | AGGCTCTCTCTCTCTCCACACACACACACACACACACACACACA |
| | | CACACACACACACACACAAACACACACCCCGCCAACCAAGGTG |
| | | CATGTAAAAAGATGTAGATTCCTCTGCCTTTCTCATCTACACAGC |
| | | CCAGGAGGGTAAGTTAATATAAGAGGGATTTATTGGTAAGAGAT |
| | | GATGCTTAATCTGTTTAACACTGGGCCTCAAAGAGAGAATTTCTT |
| | | TTCTTCTGTACTTATTAAGCACCTATTATGTGTTGAGCTTATATAT |
| | | ACAAAGGGTTATTATATGCTAATATAGTAATAGTAATGGTGGTTG |
| | | GTACTATGGTAATTACCATAAAAATTATTATCCTTTTAAAATAAAG |
| | | CTAATTATTATTGGATCTTTTTTAGTATTCATTTTATGTTTTTTATG |
| | | TTTTTGATTTTTTAAAAGACAATCTCACCCTGTTACCCAGGCTGG |
| | | AGTGCAGTGGTGCAATCATAGCTTTCTGCAGTCTTGAACTCCTG |
| | | GGCTCAAGCAATCCTCCTGCCTTGGCCTCCCAAAGTGTTGGGAT |
| | | ACAGTCATGAGCCACTGCATCTGGCCTAGGATCCATTTAGATTA |
| | | AAATATGCATTTTAAATTTTAAAATAATATGGCTAATTTTTACCTTA |
| | | TGTAATGTGTATACTGGCAATAAATCTAGTTTGCTGCCTAAAGTT |
| | | TAAAGTGCTTTCCAGTAAGCTTCATGTACGTGAGGGGAGACATT |
| | | TAAAGTGAAACAGACAGCCAGGTGTGGTGGCTCACGCCTGTAAT |
| | | CCCAGCACTCTGGGAGGCTGAGGTGGGTGGATCGCTTGAGCCC |
| | | TGGAGTTCAAGACCAGCCTGAGCAACATGGCAAAACGCTGTTTC |
| | | TATAACAAAAATTAGCCGGGCATGGTGGCATGTGCCTGTGGTCC |
| | | CAGCTACTAGGGGGCTGAGGCAGGAGAATCGTTGGAGCCCAGG |
| | | AGGTCAAGGCTGCACTGAGCAGTGCTTGCGCCACTGCACTCCA |
| | | GCCTGGGTGACAGGACCAGACCTTGCCTCAAAAAAATAAGAAGA |
| | | AAAATTAAAAATAAATGGAAACAACTACAAAGAGCTGTTGTCCTA |
| | | GATGAGCTACTTAGTTAGGCTGATATTTTGGTATTTAACTTTTAAA |
| | | GTCAGGGTCTGTCACCTGCACTACATTATTAAAATATCAATTCTC |
| | | AATGTATATCCACACAAAGACTGGTACGTGAATGTTCATAGTACC |
| | | TTTATTCACAAAACCCCAAAGTAGAGACTATCCAAATATCCATCA |
| | | ACAAGTGAACAAATAAACAAAATGTGCTATATCCATGCAATGGAA |
| | | TACCACCCTGCAGTACAAAGAAGCTACTTGGGGATGAATCCCAA |
| | | AGTCATGACGCTAAATGAAAGAGTCAGACATGAAGGAGGAGATA |
| | | ATGTATGCCATACGAAATTCTAGAAAATGAAAGTAACTTATAGTT |
| | | ACAGAAAGCAAATCAGGGCAGGCATAGAGGCTCACACCTGTAAT |
| | | CCCAGCACTTTGAGAGGCCACGTGGGAAGATTGCTAGAACTCA |
| | | GGAGTTCAAGACCAGCCTGGGCAACACAGTGAAACTCCATTCTC |
| | | CACAAAAATGGGAAAAAAAGAAAGCAAATCAGTGGTTGTCCTGT |
| | | GGGGAGGGGAAGGACTGCAAAGAGGGAAGAAGCTCTGGTGGG |
| | | GTGAGGGTGGTGATTCAGGTTCTGTATCCTGACTGTGGTAGCAG |
| | | TTTGGGGTGTTTACATCCAAAAATATTCGTAGAATTATGCATCTT |
| | | AAATGGGTGGAGTTTACTGTATGTAAATTATACCTCAATGTAAGA |
| | | AAAAATAATGTGTAAGAAAACTTTCAATTCTCTTGCCAGCAAACG |
| | | TTATTCAAATTCCTGAGCCCTTTACTTCGCAAATTCTCTGCACTT |
| | | CTGCCCCGTACCATTAGGTGACAGCACTAGCTCCACAAATTGGA |
| | | TAAATGCATTTCTGGAAAAGACTAGGGACAAAATCCAGGCATCA |
| | | CTTGTGCTTTCATATCAACCATGCTGTACAGCTTGTGTTGCTGTC |
| | | TGCAGCTGCAATGGGGACTCTTGATTTCTTTAAGGAAACTTGGG |
| | | TTACCAGAGTATTTCCACAAATGCTATTCAAATTAGTGCTTATGAT |
| | | ATGCAAGACACTGTGCTAGGAGCCAGAAAACAAAGAGGAGGAG |
| | | AAATCAGTCATTATGTGGGAACAACATAGCAAGATATTTAGATCA |
| | | TTTTGACTAGTTAAAAAAGCAGCAGAGTACAAAATCACACATGCA |
| | | ATCAGTATAATCCAAATCATGTAAATATGTGCCTGTAGAAAGACT |
| | | AGAGGAATAAACACAAGAATCTTAACAGTCATTGTCATTAGACAC |
| | | TAAGTCTAATTATTATTATTAGACACTATGATATTTGAGATTTAAA |
| | | AAATCTTTAATATTTTAAAATTTAGAGCTCTTCTATTTTTCCATAGT |
| | | ATTCAAGTTTGACAATGATCAAGTATTACTCTTTCTTTTTTTTTTTT |
| | | TTTTTTTTTTTTTGAGATGGAGTTTTGGTCTTGTTGCCCATGCTG |
| | | GAGTGGAATGGCATGACCATAGCTCACTGCAACCTCCACCTCCT |
| | | GGGTTCAAGCAAAGCTGTCGCCTCAGCCTCCCGGGTAGATGGG |
| | | ATTACAGGCGCCCACCACCACACTCGGCTAATGTTTGTATTTTTA |
| | | GTAGAGATGGGGTTTCACCATGTTGGCCAGGCTGGTCTCAAACT |
| | | CCTGACCTCAGAGGATCCACCTGCCTCAGCCTCCCAAAGTGCT |
| | | GGGATTACAGATGTAGGCCACTGCGCCCGGCCAAGTATTGCTC |
| | | TTATACATTAAAAAACAGGTGTGAGCCACTGCGCCCAGCCAGGT |
| | | ATTGCTCTTATACATTAAAAAATAGGCCGGTGCAGTGGCTCACG |
| | | CCTGTAATCCCAGCACTTTGGGAAGCCAAGGCGGGCAGAACAC |
| | | CCGAGGTCAGGAGTCCAAGGCCAGCCTGGCCAAGATGGTGAAA |
| | | CCCCGTCTCTATTAAAAATACAAACATTACCTGGGCATGATGGTG |
| | | GGCGCCTGTAATCCCAGCTACTCAGGAGGCTGAGGCAGGAGGA |
| | | TCCGCGGAGCCTGGCAGATCTGCCTGAGCCTGGGAGGTTGAGG |
| | | CTACAGTAAGCCAAGATCATGCCAGTATACTTCAGCCTGGGCGA |
| | | CAAAGTGAGACCGTAACAAAAAAAAAAAAATTTAAAAAAAGAAAT |
| | | TTAGATCAAGATCCAACTGTAAAAAGTGGCCTAAACACCACATTA |
| | | AAGAGTTTGGAGTTTATTCTGCAGGCAGAAGAGAACCATCAGGG |
| | | GGTCTTCAGCATGGGAATGGCATGGTGCACCTGGTTTTTGTGAG |
| | | ATCATGGTGGTGACAGTGTGGGGAATGTTATTTTGGAGGGACTG |
| | | GAGGCAGACAGACCGGTTAAAAGGCCAGCACAACAGATAAGGA |
| | | GGAAGAAGATGAGGGCTTGGACCGAAGCAGAGAAGAGCAAACA |
| | | GGGAAGGTACAAATTCAAGAAATATTGGGGGGTTTGAATCAACA |
| | | CATTTAGATGATTAATTAAATATGAGGACTGAGGAATAAGAAATG |
| | | AGTCAAGGATGGTTCCAGGCTGCTAGGCTGCTTACCTGAGGTG |
| | | GCAAAGTCGGGAGGAGTGGCAGTTTAGGACAGGGGGCAGTTGA |
| | | GGAATATTGTTTTGATCATTTTGAGTTTGAGGTACAAGTTGGACA |
| | | CTTAGGTAAAGACTGGAGGGGAAATCTGAATATACAATTATGGG |
| | | ACTGAGGAACAAGTTTATTTTATTTTTTGTTTCGTTTTCTTGTTGA |
| | | AGAACAAATTTAATTGTAATCCCAAGTCATCAGCATCTAGAAGAC |
| | | AGTGGCAGGAGGTGACTGTCTTGTGGGTAAGGGTTTGGGGTCC |
| | | TTGATGAGTATCTCTCAATTGGCCTTAAATATAAGCAGGAAAAGG |
| | | AGTTTATGATGGATTCCAGGCTCAGCAGGGCTCAGGAGGGCTC |
| | | AGGCAGCCAGCAGAGGAAGTCAGAGCATCTTCTTTGGTTTAGCC |
| | | CAAGTAATGACTTCCTTAAAAAGCTGAAGGAAAATCCAGAGTGA |
| | | CCAGATTATAAACTGTACTCTTGCATTTTCTCTCCCTCCTCTCAC |
| | | CCACAGCCTCTTGATGAACCGGAGGAAGTTTCTTTACCAATTCA |
| | | AAAATGTCCGCTGGGCTAAGGGTCGGCGTGAGACCTACCTGTG |
| | | CTACGTAGTGAAGAGGCGTGACAGTGCTACATCCTTTTCACTGG |
| | | ACTTTGGTTATCTTCGCAATAAGGTATCAATTAAAGTCGGCTTTG |
| | | CAAGCAGTTTAATGGTCAACTGTGAGTGCTTTTAGAGCCACCTG |
| | | CTGATGGTATTACTTCCATCCTTTTTTGGCATTTGTGTCTCTATCA |
| | | CATTCCTCAAATCCTTTTTTTTATTTCTTTTTCCATGTCCATGCAC |
| | | CCATATTAGACATGGCCCAAAATATGTGATTTAATTCCTCCCCAG |
| | | TAATGCTGGGCACCCTAATACCACTCCTTCCTTCAGTGCCAAGA |
| | | ACAACTGCTCCCAAACTGTTTACCAGCTTTCCTCAGCATCTGAAT |
| | | TGCCTTTGAGATTAATTAAGCTAAAAGCATTTTTATATGGGAGAA |
| | | TATTATCAGCTTGTCCAAGCAAAAATTTTAAATGTGAAAAACAAAT |
| | | TGTGTCTTAAGCATTTTTGAAAATTAAGGAAGAAGAATTTGGGAA |
| | | AAAATTAACGGTGGCTCAATTCTGTCTTCCAAATGATTTCTTTTC |
| | | CCTCCTACTCACATGGGTCGTAGGCCAGTGAATACATTCAACAT |
| | | GGTGATCCCCAGAAAACTCAGAGAAGCCTCGGCTGATGATTAAT |
| | | TAAATTGATCTTTCGGCTACCCGAGAGAATTACATTTCCAAGAGA |
| | | CTTCTTCACCAAAATCCAGATGGGTTTACATAAACTTCTGCCCAC |
| | | GGGTATCTCCTCTCTCCTAACACGCTGTGACGTCTGGGCTTGGT |
| | | GGAATCTCAGGGAAGCATCCGTGGGGTGGAAGGTCATCGTCTG |
| | | GCTCGTTGTTTGATGGTTATATTACCATGCAATTTTCTTTGCCTA |
| | | CATTTGTATTGAATACATCCCAATCTCCTTCCTATTCGGTGACAT |
| | | GACACATTCTATTTCAGAAGGCTTTGATTTTATCAAGCACTTTCAT |
| | | TTACTTCTCATGGCAGTGCCTATTACTTCTCTTACAATACCCATC |
| | | TGTCTGCTTTACCAAAATCTATTTCCCCTTTTCAGATCCTCCCAA |
| | | ATGGTCCTCATAAACTGTCCTGCCTCCACCTAGTGGTCCAGGTA |
| | | TATTTCCACAATGTTACATCAACAGGCACTTCTAGCCATTTTCCT |
| | | TCTCAAAAGGTGCAAAAAGCAACTTCATAAACACAAATTAAATCT |
| | | TCGGTGAGGTAGTGTGATGCTGCTTCCTCCCAACTCAGCGCACT |
| | | TCGTCTTCCTCATTCCACAAAAACCCATAGCCTTCCTTCACTCTG |
| | | CAGGACTAGTGCTGCCAAGGGTTCAGCTCTACCTACTGGTGTGC |
| | | TCTTTTGAGCAAGTTGCTTAGCCTCTCTGTAACACAAGGACAATA |
| | | GCTGCAAGCATCCCCAAAGATCATTGCAGGAGACAATGACTAAG |
| | | GCTACCAGAGCCGCAATAAAAGTCAGTGAATTTTAGCGTGGTCC |
| | | TCTCTGTCTCTCCAGAACGGCTGCCACGTGGAATTGCTCTTCCT |
| | | CCGCTACATCTCGGACTGGGACCTAGACCCTGGCCGCTGCTAC |
| | | CGCGTCACCTGGTTCACCTCCTGGAGCCCCTGCTACGACTGTG |
| | | CCCGACATGTGGCCGACTTTCTGCGAGGGAACCCCAACCTCAG |
| | | TCTGAGGATCTTCACCGCGCGCCTCTACTTCTGTGAGGACCGCA |
| | | AGGCTGAGCCCGAGGGGCTGCGGCGGCTGCACCGCGCCGGG |
| | | GTGCAAATAGCCATCATGACCTTCAAAGGTGCGAAAGGGCCTTC |
| | | CGCGCAGGCGCAGTGCAGCAGCCCGCATTCGGGATTGCGATG |
| | | CGGAATGAATGAGTTAGTGGGGAAGCTCGAGGGGAAGAAGTGG |
| | | GCGGGGATTCTGGTTCACCTCTGGAGCCGAAATTAAAGATTAGA |
| | | AGCAGAGAAAAGAGTGAATGGCTCAGAGACAAGGCCCCGAGGA |
| | | AATGAGAAAATGGGGCCAGGGTTGCTTCTTTCCCCTCGATTTGG |
| | | AACCTGAACTGTCTTCTACCCCCATATCCCCGCCTTTTTTTCCTT |
| | | TTTTTTTTTTTGAAGATTATTTTTACTGCTGGAATACTTTTGTAGAA |
| | | AACCACGAAAGAACTTTCAAAGCCTGGGAAGGGCTGCATGAAAA |
| | | TTCAGTTCGTCTCTCCAGACAGCTTCGGCGCATCCTTTTGGTAA |
| | | GGGGCTTCCTCGCTTTTTAAATTTTCTTTCTTTCTCTACAGTCTTT |
| | | TTTGGAGTTTCGTATATTTCTTATATTTTCTTATTGTTCAATCACTC |
| | | TCAGTTTTCATCTGATGAAAACTTTATTTCTCCTCCACATCAGCTT |
| | | TTTCTTCTGCTGTTTCACCATTCAGAGCCCTCTGCTAAGGTTCCT |
| | | TTTCCCTCCCTTTTCTTTCTTTTGTTGTTTCACATCTTTAAATTTCT |
| | | GTCTCTCCCCAGGGTTGCGTTTCCTTCCTGGTCAGAATTCTTTTC |
| | | TCCTTTTTTTTTTTTTTTTTTTTTTTTTTTAAACAAACAAACAAAAAA |
| | | CCCAAAAAAACTCTTTCCCAATTTACTTTCTTCCAACATGTTACAA |
| | | AGCCATCCACTCAGTTTAGAAGACTCTCCGGCCCCACCGACCCC |
| | | CAACCTCGTTTTGAAGCCATTCACTCAATTTGCTTCTCTCTTTCT |
| | | CTACAGCCCCTGTATGAGGTTGATGACTTACGAGACGCATTTCG |
| | | TACTTTGGGACTTTGATAGCAACTTCCAGGAATGTCACACACGAT |
| | | GAAATATCTCTGCTGAAGACAGTGGATAAAAAACAGTCCTTCAA |
| | | GTCTTCTCTGTTTTTATTCTTCAACTCTCACTTTCTTAGAGTTTAC |
| | | AGAAAAAATATTTATATACGACTCTTTAAAAAGATCTATGTCTTGA |
| | | AAATAGAGAAGGAACACAGGTCTGGCCAGGGACGTGCTGCAAT |
| | | TGGTGCAGTTTTGAATGCAACATTGTCCCCTACTGGGAATAACA |
| | | GAACTGCAGGACCTGGGAGCATCCTAAAGTGTCAACGTTTTTCT |
| | | ATGACTTTTAGGTAGGATGAGAGCAGAAGGTAGATCCTAAAAAG |
| | | CATGGTGAGAGGATCAAATGTTTTTATATCAACATCCTTTATTATT |
| | | TGATTCATTTGAGTTAACAGTGGTGTTAGTGATAGATTTTTCTATT |
| | | CTTTTCCCTTGACGTTTACTTTCAAGTAACACAAACTCTTCCATCA |
| | | GGCCATGATCTATAGGACCTCCTAATGAGAGTATCTGGGTGATT |
| | | GTGACCCCAAACCATCTCTCCAAAGCATTAATATCCAATCATGCG |
| | | CTGTATGTTTTAATCAGCAGAAGCATGTTTTTATGTTTGTACAAAA |
| | | GAAGATTGTTATGGGTGGGGATGGAGGTATAGACCATGCATGGT |
| | | CACCTTCAAGCTACTTTAATAAAGGATCTTAAAATGGGCAGGAG |
| | | GACTGTGAACAAGACACCCTAATAATGGGTTGATGTCTGAAGTA |
| | | GCAAATCTTCTGGAAACGCAAACTCTTTTAAGGAAGTCCCTAATT |
| | | TAGAAACACCCACAAACTTCACATATCATAATTAGCAAACAATTG |
| | | GAAGGAAGTTGCTTGAATGTTGGGGAGAGGAAAATCTATTGGCT |
| | | CTCGTGGGTCTCTTCATCTCAGAAATGCCAATCAGGTCAAGGTT |
| | | TGCTACATlliGTATGTGTGTGATGCTTCTCCCAAAGGTATATTA |
| | | ACTATATAAGAGAGTTGTGACAAAACAGAATGATAAAGCTGCGA |
| | | ACCGTGGCACACGCTCATAGTTCTAGCTGCTTGGGAGGTTGAG |
| | | GAGGGAGGATGGCTTGAACACAGGTGTTCAAGGCCAGCCTGGG |
| | | CAACATAACAAGATCCTGTCTCTCAAAAAAAAAAAAAAAAAAAAG |
| | | AAAGAGAGAGGGCCGGGCGTGGTGGCTCACGCCTGTAATCCCA |
| | | GCACTTTGGGAGGCCGAGCCGGGCGGATCACCTGTGGTCAGG |
| | | AGTTTGAGACCAGCCTGGCCAACATGGCAAAACCCCGTCTGTAC |
| | | TCAAAATGCAAAAATTAGCCAGGCGTGGTAGCAGGCACCTGTAA |
| | | TCCCAGCTACTTGGGAGGCTGAGGCAGGAGAATCGCTTGAACC |
| | | CAGGAGGTGGAGGTTGCAGTAAGCTGAGATCGTGCCGTTGCAC |
| | | TCCAGCCTGGGCGACAAGAGCAAGACTCTGTCTCAGAAAAAAAA |
| | | AAAAAAAAGAGAGAGAGAGAGAAAGAGAACAATATTTGGGAGAG |
| | | AAGGATGGGGAAGCATTGCAAGGAAATTGTGCTTTATCCAACAA |
| | | AATGTAAGGAGCCAATAAGGGATCCCTATTTGTCTCTlliGGTGT |
| | | CTATTTGTCCCTAACAACTGTCTTTGACAGTGAGAAAAATATTCA |
| | | GAATAACCATATCCCTGTGCCGTTATTACCTAGCAACCCTTGCAA |
| | | TGAAGATGAGCAGATCCACAGGAAAACTTGAATGCACAACTGTC |
| | | TTATTTTAATCTTATTGTACATAAGTTTGTAAAAGAGTTAAAAATT |
| | | GTTACTTCATGTATTCATTTATATTTTATATTATTTTGCGTCTAATG |
| | | ATTTTTTATTAACATGATTTCCTTTTCTGATATATTGAAATGGAGT |
| | | CTCAAAGCTTCATAAATTTATAACTTTAGAAATGATTCTAATAACA |
| | | ACGTATGTAATTGTAACATTGCAGTAATGGTGCTACGAAGCCATT |
| | | TCTCTTGATTTTTAGTAAACTTTTATGACAGCAAATTTGCTTCTGG |
| | | CTCACTTTCAATCAGTTAAATAAATGATAAATAATTTTGGAAGCTG |
| | | TGAAGATAAAATACCAAATAAAATAATATAAAAGTGATTTATATGA |
| | | AGTTAAAATAAAAAATCAGTATGATGGAATAAACTTG |
| Canine AID (clAID) | 1374 | MDSLLMKQRKFLYHFKNVRWAKGRHETYLCYVVKRRDSATSFSLD |
| polypeptide | | FGHLRNKSGCHVELLFLRYISDWDLDPGRCYRVTWFTSWSPCYDC |
| sequence | | ARHVADFLRGYPNLSLRIFAARLYFCEDRKAEPEGLRRLHRAGVQI |
| | | AIMTFKDYFYCWNTFVENREKTFKAWEGLHENSVRLSRQLRRILLP |
| | | LYEVDDLRDAFRTLGL |
| Bovine AID (btAID) | 1375 | MDSLLKKQRQFLYQFKNVRWAKGRHETYLCYVVKRRDSPTSFSLD |
| polypeptide | | FGHLRNKAGCHVELLFLRYISDWDLDPGRCYRVTWFTSWSPCYDC |
| sequence | | ARHVADFLRGYPNLSLRIFTARLYFCDKERKAEPEGLRRLHRAGVQ |
| | | IAIMTFKDYFYCWNTFVENHERTFKAWEGLHENSVRLSRQLRRILLP |
| | | LYEVDDLRDAFRTLGL |
| Rat AID | 1376 | MAVGSKPKAALVGPHWERERIWCFLCSTGLGTQQTGQTSRWLRP |
| polypeptide | | AATQDPVSPPRSLLMKQRKFLYHFKNVRWAKGRHETYLCYVVKRR |
| sequence | | DSATSFSLDFGYLRNKSGCHVELLFLRYISDWDLDPGRCYRVTWFT |
| | | SWSPCYDCARHVADFLRGNPNLSLRIFTARLTGWGALPAGLMSPA |
| | | RPSDYFYCWNTFVENHERTFKAWEGLHENSVRLSRRLRRILLPLYE |
| | | VDDLRDAFRTLGL |
| Mouse (mAID) AID | 1377 | MDSLLMNRRKFLYQFKNVRWAKGRRETYLCYVVKRRDSATSFSLD |
| polypeptide | | FGYLRNKNGCHVELLFLRYISDWDLDPGRCYRVTWFTSWSPCYDC |
| sequence | | ARHVADFLRGNPNLSLRIFTARLYFCEDRKAEPEGLRRLHRAGVQI |
| | | AIMTFKDYFYCWNTFVENHERTFKAWEGLHENSVRLSRQLRRILLP |
| | | LYEVDDLRDAFRTLGL |
| rAPOBEC-1 | 1378 | MSSETGPVAVDPTLRRRIEPHEFEVFFDPRELRKETCLLYEINWGG |
| polypeptide | | RHSIWRHTSQNTNKHVEVNFIEKFTTERYFCPNTRCSITWFLSWSP |
| sequence | | CGECSRAITEFLSRYPHVTLFIYIARLYHHADPRNRQGLRDLISSGVT |
| | | IQIMTEQESGYCWRNFVNYSPSNEAHWPRYPHLWVRLYVLELYCII |
| | | LGLPPCLNILRRKQPQLTFFTIALQSCHYQRLPPHILWATGLK |
| maAPOBEC-1 | 1379 | MSSETGPVVVDPTLRRRIEPHEFDAFFDQGELRKETCLLYEIRWGG |
| polypeptide | | RHNIWRHTGQNTSRHVEINFIEKFTSERYFYPSTRCSIVWFLSWSP |
| sequence | | CGECSKAITEFLSGHPNVTLFIYAARLYHHTDQRNRQGLRDLISRGV |
| | | TIRIMTEQEYCYCWRNFVNYPPSNEVYWPRYPNLWMRLYALELYCI |
| | | HLGLPPCLKIKRRHQYPLTFFRLNLQSCHYQRIPPHILWATGFI |
| ppAPOBEC-1 | 1380 | MTSEKGPSTGDPTLRRRIESWEFDVFYDPRELRKETCLLYEIKWGM |
| polypeptide | | SRKIWRSSGKNTTNHVEVNFIKKFTSERRFHSSISCSITWFLSWSPC |
| sequence | | WECSQAIREFLSQHPGVTLVIYVARLFWHMDQRNRQGLRDLVNSG |
| | | VTIQIMRASEYYHCWRNFVNYPPGDEAHWPQYPPLWMMLYALELH |
| | | CIILSLPPCLKISRRWQNHLAFFRLHLQNCHYQTIPPHILLATGLIHPS |
| | | VTWR |
| ocAPOBEC1 | 1381 | MASEKGPSNKDYTLRRRIEPWEFEVFFDPQELRKEACLLYEIKWGA |
| polypeptide | | SSKTWRSSGKNTTNHVEVNFLEKLTSEGRLGPSTCCSITWFLSWS |
| sequence | | PCWECSMAIREFLSQHPGVTLIIFVARLFQHMDRRNRQGLKDLVTS |
| | | GVTVRVMSVSEYCYCWENFVNYPPGKAAQWPRYPPRWMLMYAL |
| | | ELYCIILGLPPCLKISRRHQKQLTFFSLTPQYCHYKMIPPYILLATGLL |
| | | QPSVPWR |
| mdAPOBEC-1 | 1382 | MNSKTGPSVGDATLRRRIKPWEFVAFFNPQELRKETCLLYEIKWGN |
| polypeptide | | QNIWRHSNQNTSQHAEINFMEKFTAERHFNSSVRCSITWFLSWSP |
| sequence | | CWECSKAIRKFLDHYPNVTLAIFISRLYWHMDQQHRQGLKELVHSG |
| | | VTIQIMSYSEYHYCWRNFVDYPQGEEDYWPKYPYLWIMLYVLELH |
| | | CIILGLPPCLKISGSHSNQLALFSLDLQDCHYQKIPYNVLVATGLVQP |
| | | FVTWR |
| ppAPOBEC-2 | 1383 | MAQKEEAAAATEAASQNGEDLENLDDPEKLKELIELPPFEIVTGERL |
| polypeptide | | PANFFKFQFRNVEYSSGRNKTFLCYVVEAQGKGGQVQASRGYLE |
| sequence | | DEHAAAHAEEAFFNTILPAFDPALRYNVTWYVSSSPCAACADRIIKT |
| | | LSKTKNLRLLILVGRLFMWEELEIQDALKKLKEAGCKLRIMKPQDFE |
| | | YVWQNFVEQEEGESKAFQPWEDIQENFLYYEEKLADILK |
| btAPOBEC-2 | 1384 | MAQKEEAAAAAEPASQNGEEVENLEDPEKLKELIELPPFEIVTGERL |
| polypeptide | | PAHYFKFQFRNVEYSSGRNKTFLCYVVEAQSKGGQVQASRGYLED |
| sequence | | EHATNHAEEAFFNSIMPTFDPALRYMVTWYVSSSPCAACADRIVKT |
| | | LNKTKNLRLLILVGRLFMWEEPEIQAALRKLKEAGCRLRIMKPQDFE |
| | | YIWQNFVEQEEGESKAFEPWEDIQENFLYYEEKLADILK |
| mAPOBEC-3-(1) | 1385 | MQPQRLGPRAGMGPFCLGCSHRKCYSPIRNLISQETFKFHFKNLG |
| polypeptide | | YAKGRKDTFLCYEVTRKDCDSPVSLHHGVFKNKDNIHAEICFLYWF |
| sequence | | HDKVLKVLSPREEFKITWYMSWSPCFECAEQIVRFLATHHNLSLDIF |
| | | SSRLYNVQDPETQQNLCRLVQEGAQVAAMDLYEFKKCWKKFVDN |
| | | GGRRFRPWKRLLTNFRYQDSKLQEILRPCYISVPSSSSSTLSNICLT |
| | | KGLPETRFWVEGRRMDPLSEEEFYSQFYNQRVKHLCYYHRMKPY |
| | | LCYQLEQFNGQAPLKGCLLSEKGKQHAEILFLDKIRSMELSQVTITC |
| | | YLTWSPCPNCAWQLAAFKRDRPDLILHIYTSRLYFHWKRPFQKGLC |
| | | SLWQSGILVDVMDLPQFTDCWTNFVNPKRPFWPWKGLEIISRRTQ |
| | | RRLRRIKESWGLQDLVNDFGNLQLGPPMS |
| APOBEC-3-(2) | 1386 | MGPFCLGCSHRKCYSPIRNLISQETFKFHFKNLGYAKGRKDTFLCY |
| (Mouse APOBEC- | | EVTRKDCDSPVSLHHGVFKNKDNIHAEICFLYWFHDKVLKVLSPRE |
| 3) polypeptide | | EFKITWYMSWSPCFECAEQIVRFLATHHNLSLDIFSSRLYNVQDPET |
| sequence | | QQNLCRLVQEGAQVAAMDLYEFKKCWKKFVDNGGRRFRPWKRLL |
| | | TNFRYQDSKLQEILRPCYIPVPSSSSSTLSNICLTKGLPETRFCVEG |
| | | RRMDPLSEEEFYSQFYNQRVKHLCYYHRMKPYLCYQLEQFNGQA |
| | | PLKGCLLSEKGKQHAEILFLDKIRSMELSQVTITCYLTWSPCPNCAW |
| | | QLAAFKRDRPDLILHIYTSRLYFHWKRPFQKGLCSLWQSGILVDVM |
| | | DLPQFTDCWTNFVNPKRPFWPWKGLEIISRRTQRRLRRIKESWGL |
| | | QDLVNDFGNLQLGPPMS |
| APOBEC-3 | 1387 | MGPFCLGCSHRKCYSPIRNLISQETFKFHFKNRLRYAIDRKDTFLCY |
| polypeptide | | EVTRKDCDSPVSLHHGVFKNKDNIHAEICFLYWFHDKVLKVLSPRE |
| sequence | | EFKITWYMSWSPCFECAEQVLRFLATHHNLSLDIFSSRLYNIRDPEN |
| | | QQNLCRLVQEGAQVAAMDLYEFKKCWKKFVDNGGRRFRPWKKLL |
| | | TNFRYQDSKLQEILRPCYIPVPSSSSSTLSNICLTKGLPETRFCVER |
| | | RRVHLLSEEEFYSQFYNQRVKHLCYYHGVKPYLCYQLEQFNGQAP |
| | | LKGCLLSEKGKQHAEILFLDKIRSMELSQVIITCYLTWSPCPNCAWQ |
| | | LAAFKRDRPDLILHIYTSRLYFHWKRPFQKGLCSLWQSGILVDVMDL |
| | | PQFTDCWTNFVNPKRPFWPWKGLEIISRRTQRRLHRIKESWGLQD |
| | | LVNDFGNLQLGPPMS |
| hAPOBEC-3A | 1388 | MEASPASGPRHLMDPHIFTSNFNNGIGRHKTYLCYEVERLDNGTSV |
| polypeptide | | KMDQHRGFLHNQAKNLLCGFYGRHAELRFLDLVPSLQLDPAQIYR |
| sequence | | VTWFISWSPCFSWGCAGEVRAFLQENTHVRLRIFAARIYDYDPLYK |
| | | EALQMLRDAGAQVSIMTYDEFKHCWDTFVDHQGCPFQPWDGLDE |
| | | HSQALSGRLRAILQNQGN |
| hAPOBEC-3F | 1389 | MKPHFRNTVERMYRDTFSYNFYNRPILSRRNTVWLCYEVKTKGPS |
| polypeptide | | RPRLDAKIFRGQVYSQPEHHAEMCFLSWFCGNQLPAYKCFQITWF |
| sequence | | VSWTPCPDCVAKLAEFLAEHPNVTLTISAARLYYYWERDYRRALCR |
| | | LSQAGARVKIMDDEEFAYCWENFVYSEGQPFMPWYKFDDNYAFL |
| | | HRTLKEILRNPMEAMYPHIFYFHFKNLRKAYGRNESWLCFTMEVVK |
| | | HHSPVSWKRGVFRNQVDPETHCHAERCFLSWFCDDILSPNTNYEV |
| | | TWYTSWSPCPECAGEVAEFLARHSNVNLTIFTARLYYFWDTDYQE |
| | | GLRSLSQEGASVEIMGYKDFKYCWENFVYNDDEPFKPWKGLKYNF |
| | | LFLDSKLQEILE |
| Rhesus macaque | 1390 | MVEPMDPRTFVSNFNNRPILSGLNTVWLCCEVKTKDPSGPPLDAKI |
| APOBEC-3G | | FQGKVYSKAKYHPEMRFLRWFHKWRQLHHDQEYKVTWYVSWSP |
| polypeptide | | CTRCANSVATFLAKDPKVTLTIFVARLYYFWKPDYQQALRILCQKR |
| sequence | | GGPHATMKIMNYNEFQDCWNKFVDGRGKPFKPRNNLPKHYTLLQ |
| | | ATLGELLRHLMDPGTFTSNFNNKPWVSGQHETYLCYKVERLHNDT |
| | | WVPLNQHRGFLRNQAPNIHGFPKGRHAELCFLDLIPFWKLDGQQY |
| | | RVTCFTSWSPCFSCAQEMAKFISNNEHVSLCIFAARIYDDQGRYQE |
| | | GLRALHRDGAKIAMMNYSEFEYCWDTFVDRQGRPFQPWDGLDEH |
| | | SQALSGRLRAI |
| Chimpanzee | 1391 | MKPHFRNPVERMYQDTFSDNFYNRPILSHRNTVWLCYEVKTKGPS |
| APOBEC-3G | | RPPLDAKIFRGQVYSKLKYHPEMRFFHWFSKWRKLHRDQEYEVT |
| polypeptide | | WYISWSPCTKCTRDVATFLAEDPKVTLTIFVARLYYFWDPDYQEAL |
| sequence | | RSLCQKRDGPRATMKIMNYDEFQHCWSKFVYSQRELFEPWNNLP |
| | | KYYILLHIMLGEILRHSMDPPTFTSNFNNELWVRGRHETYLCYEVER |
| | | LHNDTWVLLNQRRGFLCNQAPHKHGFLEGRHAELCFLDVIPFWKL |
| | | DLHQDYRVTCFTSWSPCFSCAQEMAKFISNNKHVSLCIFAARIYDD |
| | | QGRCQEGLRTLAKAGAKISIMTYSEFKHCWDTFVDHQGCPFQPWD |
| | | GLEEHSQALSGRLRAILQNQGN |
| Green monkey | 1392 | MNPQIRNMVEQMEPDIFVYYFNNRPILSGRNTVWLCYEVKTKDPS |
| APOBEC-3G | | GPPLDANIFQGKLYPEAKDHPEMKFLHWFRKWRQLHRDQEYEVT |
| polypeptide | | WYVSWSPCTRCANSVATFLAEDPKVTLTIFVARLYYFWKPDYQQA |
| sequence | | LRILCQERGGPHATMKIMNYNEFQHCWNEFVDGQGKPFKPRKNLP |
| | | KHYTLLHATLGELLRHVMDPGTFTSNFNNKPWVSGQRETYLCYKV |
| | | ERSHNDTWVLLNQHRGFLRNQAPDRHGFPKGRHAELCFLDLIPFW |
| | | KLDDQQYRVTCFTSWSPCFSCAQKMAKFISNNKHVSLCIFAARIYD |
| | | DQGRCQEGLRTLHRDGAKIAVMNYSEFEYCWDTFVDRQGRPFQP |
| | | WDGLDEHSQALSGRLRAI |
| Human APOBEC- | 1393 | MKPHFRNTVERMYRDTFSYNFYNRPILSRRNTVWLCYEVKTKGPS |
| 3G polypeptide | | RPPLDAKIFRGQVYSELKYHPEMRFFHWFSKWRKLHRDQEYEVT |
| sequence | | WYISWSPCTKCTRDMATFLAEDPKVTLTIFVARLYYFWDPDYQEAL |
| | | RSLCQKRDGPRATMKIMNYDEFQHCWSKFVYSQRELFEPWNNLP |
| | | KYYILLHIMLGEILRHSMDPPTFTFNFNNEPWVRGRHETYLCYEVER |
| | | MHNDTWVLLNQRRGFLCNQAPHKHGFLEGRHAELCFLDVIPFWKL |
| | | DLDQDYRVTCFTSWSPCFSCAQEMAKFISKNKHVSLCIFTARIYDD |
| | | QGRCQEGLRTLAEAGAKISIMTYSEFKHCWDTFVDHQGCPFQPWD |
| | | GLDEHSQDLSGRLRAILQNQEN |
| Human APOBEC- | 1394 | MNPQIRNPMERMYRDTFYDNFENEPILYGRSYTWLCYEVKIKRGR |
| 3B polypeptide | | SNLLWDTGVFRGQVYFKPQYHAEMCFLSWFCGNQLPAYKCFQIT |
| sequence | | WFVSWTPCPDCVAKLAEFLSEHPNVTLTISAARLYYYWERDYRRAL |
| | | CRLSQAGARVTIMDYEEFAYCWENFVYNEGQQFMPWYKFDENYA |
| | | FLHRTLKEILRYLMDPDTFTFNFNNDPLVLRRRQTYLCYEVERLDN |
| | | GTWVLMDQHMGFLCNEAKNLLCGFYGRHAELRFLDLVPSLQLDPA |
| | | QIYRVTWFISWSPCFSWGCAGEVRAFLQENTHVRLRIFAARIYDYD |
| | | PLYKEALQMLRDAGAQVSIMTYDEFEYCWDTFVYRQGCPFQPWD |
| | | GLEEHSQALSGRLRAILQNQGN |
| RatAPOBEC-3B | 1395 | MQPQGLGPNAGMGPVCLGCSHRRPYSPIRNPLKKLYQQTFYFHFK |
| polypeptide | | NVRYAWGRKNNFLCYEVNGMDCALPVPLRQGVFRKQGHIHAELC |
| sequence | | FIYWFHDKVLRVLSPMEEFKVTWYMSWSPCSKCAEQVARFLAAHR |
| | | NLSLAIFSSRLYYYLRNPNYQQKLCRLIQEGVHVAAMDLPEFKKCW |
| | | NKFVDNDGQPFRPWMRLRINFSFYDCKLQEIFSRMNLLREDVFYLQ |
| | | FNNSHRVKPVQNRYYRRKSYLCYQLERANGQEPLKGYLLYKKGEQ |
| | | HVEILFLEKMRSMELSQVRITCYLTWSPCPNCARQLAAFKKDHPDLl |
| | | LRIYTSRLYFWRKKFQKGLCTLWRSGIHVDVMDLPQFADCWTNFV |
| | | NPQRPFRPWNELEKNSWRIQRRLRRIKESWGL |
| Bovine APOBEC- | 1396 | DGWEVAFRSGTVLKAGVLGVSMTEGWAGSGHPGQGACVWTPGT |
| 3B polypeptide | | RNTMNLLREVLFKQQFGNQPRVPAPYYRRKTYLCYQLKQRNDLTL |
| sequence | | DRGCFRNKKQRHAERFIDKINSLDLNPSQSYKIICYITWSPCPNCAN |
| | | ELVNFITRNNHLKLEIFASRLYFHWIKSFKMGLQDLQNAGISVAVMT |
| | | HTEFEDCWEQFVDNQSRPFQPWDKLEQYSASIRRRLQRILTAPI |
| Chimpanzee | 1397 | MNPQIRNPMEWMYQRTFYYNFENEPILYGRSYTWLCYEVKIRRGH |
| APOBEC-3B | | SNLLWDTGVFRGQMYSQPEHHAEMCFLSWFCGNQLSAYKCFQIT |
| polypeptide | | WFVSWTPCPDCVAKLAKFLAEHPNVTLTISAARLYYYWERDYRRAL |
| sequence | | CRLSQAGARVKIMDDEEFAYCWENFVYNEGQPFMPWYKFDDNYA |
| | | FLHRTLKEIIRHLMDPDTFTFNFNNDPLVLRRHQTYLCYEVERLDNG |
| | | TWVLMDQHMGFLCNEAKNLLCGFYGRHAELRFLDLVPSLQLDPAQ |
| | | IYRVTWFISWSPCFSWGCAGQVRAFLQENTHVRLRIFAARIYDYDP |
| | | LYKEALQMLRDAGAQVSIMTYDEFEYCWDTFVYRQGCPFQPWDG |
| | | LEEHSQALSGRLRAILQVRASSLCMVPHRPPPPPQSPGPCLPLCSE |
| | | PPLGSLLPTGRPAPSLPFLLTASFSFPPPASLPPLPSLSLSPGHLPV |
| | | PSFHSLTSCSIQPPCSSRIRETEGWASVSKEGRDLG |
| Human APOBEC- | 1398 | MNPQIRNPMKAMYPGTFYFQFKNLWEANDRNETWLCFTVEGIKRR |
| 3C polypeptide | | SWSWKTGVFRNQVDSETHCHAERCFLSWFCDDILSPNTKYQVTW |
| sequence | | YTSWSPCPDCAGEVAEFLARHSNVNLTIFTARLYYFQYPCYQEGLR |
| | | SLSQEGVAVEIMDYEDFKYCWENFVYNDNEPFKPWKGLKTNFRLL |
| | | KRRLRESLQ |
| Gorilla APOBEC- | 1399 | MNPQIRNPMKAMYPGTFYFQFKNLWEANDRNETWLCFTVEGIKRR |
| 3C polypeptide | | SVVSWKTGVFRNQVDSETHCHAERCFLSWECDDILSPNTNYQVT |
| sequence | | WYTSWSPCPECAGEVAEFLARHSNVNLTIFTARLYYFQDTDYQEG |
| | | LRSLSQEGVAVKIMDYKDFKYCWENFVYNDDEPFKPWKGLKYNFR |
| | | FLKRRLQEILE |
| Rhesus macaque | 1400 | MDGSPASRPRHLMDPNTFTFNFNNDLSVRGRHQTYLCYEVERLDN |
| APOBEC-3A | | GTWVPMDERRGFLCNKAKNVPCGDYGCHVELRFLCEVPSWQLDP |
| polypeptide | | AQTYRVTWFISWSPCFRRGCAGQVRVFLQENKHVRLRIFAARIYDY |
| sequence | | DPLYQEALRTLRDAGAQVSIMTYEEFKHCWDTFVDRQGRPFQPW |
| | | DGLDEHSQALSGRLRAILQNQGN |
| Bovine APOBEC- | 1401 | MDEYTFTENFNNQGWPSKTYLCYEMERLDGDATIPLDEYKGFVRN |
| 3A polypeptide | | KGLDQPEKPCHAELYFLGKIHSWNLDRNQHYRLTCFISWSPCYDC |
| sequence | | AQKLTTFLKENHHISLHILASRIYTHNRFGCHQSGLCELQAAGARITI |
| | | MTFEDFKHCWETFVDHKGKPFQPWEGLNVKSQALCTELQAILKTQ |
| | | QN |
| Human APOBEC- | 1402 | MALLTAETFRLQFNNKRRLRRPYYPRKALLCYQLTPQNGSTPTRGY |
| 3H polypeptide | | FENKKKCHAEICFINEIKSMGLDETQCYQVTCYLTWSPCSSCAWEL |
| sequence | | VDFIKAHDHLNLGIFASRLYYHWCKPQQKGLRLLCGSQVPVEVMGF |
| | | PKFADCWENFVDHEKPLSFNPYKMLEELDKNSRAIKRRLERIKIPGV |
| | | RAQGRYMDILCDAEV |
| Rhesus macaque | 1403 | MALLTAKTFSLQFNNKRRVNKPYYPRKALLCYQLTPQNGSTPTRG |
| APOBEC-3H | | HLKNKKKDHAEIRFINKIKSMGLDETQCYQVTCYLTWSPCPSCAGE |
| polypeptide | | LVDFIKAHRHLNLRIFASRLYYHWRPNYQEGLLLLCGSQVPVEVMG |
| sequence | | LPEFTDCWENFVDHKEPPSFNPSEKLEELDKNSQAIKRRLERIKSR |
| | | SVDVLENGLRSLQLGPVTPSSSIRNSR |
| Human APOBEC- | 1404 | MNPQIRNPMERMYRDTFYDNFENEPILYGRSYTWLCYEVKIKRGR |
| 3D polypeptide | | SNLLWDTGVFRGPVLPKRQSNHRQEVYFRFENHAEMCFLSWFCG |
| sequence | | NRLPANRRFQITWFVSWNPCLPCVVKVTKFLAEHPNVTLTISAARL |
| | | YYYRDRDWRWVLLRLHKAGARVKIMDYEDFAYCWENFVCNEGQP |
| | | FMPWYKFDDNYASLHRTLKEILRNPMEAMYPHIFYFHFKNLLKACG |
| | | RNESWLCFTMEVTKHHSAVFRKRGVFRNQVDPETHCHAERCFLS |
| | | WFCDDILSPNTNYEVTWYTSWSPCPECAGEVAEFLARHSNVNLTIF |
| | | TARLCYFWDTDYQEGLCSLSQEGASVKIMGYKDFVSCWKNFVYSD |
| | | DEPFKPWKGLQTNFRLLKRRLREILQ |
| Human APOBEC-1 | 1405 | MTSEKGPSTGDPTLRRRIEPWEFDVFYDPRELRKEACLLYEIKWG |
| polypeptide | | MSRKIWRSSGKNTTNHVEVNFIKKFTSERDFHPSMSCSITWFLSWS |
| sequence | | PCWECSQAIREFLSRHPGVTLVIYVARLFWHMDQQNRQGLRDLVN |
| | | SGVTIQIMRASEYYHCWRNFVNYPPGDEAHWPQYPPLWMMLYAL |
| | | ELHCIILSLPPCLKISRRWQNHLTFFRLHLQNCHYQTIPPHILLATGLI |
| | | HPSVAWR |
| Mouse APOBEC-1 | 1406 | MSSETGPVAVDPTLRRRIEPHEFEVFFDPRELRKETCLLYEINWGG |
| polypeptide | | RHSVWRHTSQNTSNHVEVNFLEKFTTERYFRPNTRCSITWFLSWS |
| sequence | | PCGECSRAITEFLSRHPYVTLFIYIARLYHHTDQRNRQGLRDLISSG |
| | | VTIQIMTEQEYCYCWRNFVNYPPSNEAYWPRYPHLWVKLYVLELY |
| | | CIILGLPPCLKILRRKQPQLTFFTITLQTCHYQRIPPHLLWATGLK |
| Human APOBEC-2 | 1407 | MAQKEEAAVATEAASQNGEDLENLDDPEKLKELIELPPFEIVTGERL |
| polypeptide | | PANFFKFQFRNVEYSSGRNKTFLCYVVEAQGKGGQVQASRGYLE |
| sequence | | DEHAAAHAEEAFFNTILPAFDPALRYNVTWYVSSSPCAACADRIIKT |
| | | LSKTKNLRLLILVGRLFMWEEPEIQAALKKLKEAGCKLRIMKPQDFE |
| | | YVWQNFVEQEEGESKAFQPWEDIQENFLYYEEKLADILK |
| Mouse APOBEC-2 | 1408 | MAQKEEAAEAAAPASQNGDDLENLEDPEKLKELIDLPPFEIVTGVRL |
| polypeptide | | PVNFFKFQFRNVEYSSGRNKTFLCYVVEVQSKGGQAQATQGYLED |
| sequence | | EHAGAHAEEAFFNTILPAFDPALKYNVTWYVSSSPCAACADRILKTL |
| | | SKTKNLRLLILVSRLFMWEEPEVQAALKKLKEAGCKLRIMKPQDFEY |
| | | IWQNFVEQEEGESKAFEPWEDIQENFLYYEEKLADILK |
| Rat APOBEC-2 | 1409 | MAQKEEAAEAAAPASQNGDDLENLEDPEKLKELIDLPPFEIVTGVRL |
| polypeptide | | PVNFFKFQFRNVEYSSGRNKTFLCYVVEAQSKGGQVQATQGYLED |
| sequence | | EHAGAHAEEAFFNTILPAFDPALKYNVTWYVSSSPCAACADRILKTL |
| | | SKTKNLRLLILVSRLFMWEEPEVQAALKKLKEAGCKLRIMKPQDFEY |
| | | LWQNFVEQEEGESKAFEPWEDIQENFLYYEEKLADILK |
| Petromyzon | 1410 | MTDAEYVRIHEKLDIYTFKKQFFNNKKSVSHRCYVLFELKRRGERR |
| marinus CDA1 | | ACFWGYAVNKPQSGTERGIHAEIFSIRKVEEYLRDNPGQFTINWYS |
| (pmCDA1) | | SWSPCADCAEKILEWYNQELRGNGHTLKIWACKLYYEKNARNQIG |
| polypeptide | | LWNLRDNGVGLNVMVSEHYQCCRKIFIQSSHNQLNENRWLEKTLK |
| sequence | | RAEKRRSELSFMIQVKILHTTKSPAV |
| Human | 1411 | MKPHFRNTVERMYRDTFSYNFYNRPILSRRNTVWLCYEVKTKGPS |
| APOBEC3G | | RPPLDAKIFRGQVYSELKYHPEMRFFHWFSKWRKLHRDQEYEVT |
| D316R D317R | | WYISWSPCTKCTRDMATFLAEDPKVTLTIFVARLYYFWDPDYQEAL |
| polypeptide | | RSLCQKRDGPRATMKFNYDEFQHCWSKFVYSQRELFEPWNNLPK |
| sequence | | YYILLHFMLGEILRHSMDPPTFTFNFNNEPWVRGRHETYLCYEVER |
| | | MHNDTWVLLNQRRGFLCNQAPHKHGFLEGRHAELCFLDVIPFWKL |
| | | DLDQDYRVTCFTSWSPCFSCAQEMAKFISKKHVSLCIFTARIYRRQ |
| | | GRCQEGLRTLAEAGAKISFTYSEFKHCWDTFVDHQGCPFQPWDG |
| | | LDEHSQDLSGRLRAILQNQEN |
| Human | 1412 | MDPPTFTFNFNNEPWWGRHETYLCYEVERMHNDTWVLLNQRRGF |
| APOBEC3G chain | | LCNQAPHKHGFLEGRHAELCFLDVIPFWKLDLDQDYRVTCFTSWS |
| A polypeptide | | PCFSCAQEMAKFISKNKHVSLCIFTARIYDDQGRCQEGLRTLAEAG |
| sequence | | AKISFTYSEFKHCWDTFVDHQGCPFQPWDGLDEHSQDLSGRLRAI |
| | | LQ |
| Human | 1414 | MDPPTFTFNFNNEPWVRGRHETYLCYEVERMHNDTWVLLNQRRG |
| APOBEC3G chain | | FLCNQAPHKHGFLEGRHAELCFLDVIPFWKLDLDQDYRVTCFTSW |
| A D120R D121R | | SPCFSCAQEMAKFISKNKHVSLCIFTARIYRRQGRCQEGLRTLAEA |
| polypeptide | | GAKISFMTYSEFKHCWDTFVDHQGCPFQPWDGLDEHSQDLSGRL |
| sequence | | RAILQ |
| hAPOBEC-4 | 1415 | MEPIYEEYLANHGTIVKPYYWLSFSLDCSNCPYHIRTGEEARVSLTE |
| polypeptide | | FCQIFGFPYGTTFPQTKHLTFYELKTSSGSLVQKGHASSCTGNYIHP |
| sequence | | ESMLFEMNGYLDSAIYNNDSIRHIILYSNNSPCNEANHCCISKMYNF |
| | | LITYPGITLSIYFSQLYHTEMDFPASAWNREALRSLASLWPRVVLSPI |
| | | SGGIWHSVLHSFISGVSGSHVFQPILTGRALADRHNAYEINAITGVK |
| | | PYFTDVLLQTKRNPNTKAQEALESYPLNNAFPGQFFQMPSGQLQP |
| | | NLPPDLRAPVVFVLVPLRDLPPMHMGQNPNKPRNIVRHLNMPQMS |
| | | FQETKDLGRLPTGRSVEIVEITEQFASSKEADEKKKKKGKK |
| rAPOBEC-4 | 1416 | MEPLYEEYLTHSGTIVKPYYWLSVSLNCTNCPYHIRTGEEARVPYT |
| polypeptide | | EFHQTFGFPWSTYPQTKHLTFYELRSSSGNLIQKGLASNCTGSHTH |
| sequence | | PESMLFERDGYLDSLIFHDSNIRHIILYSNNSPCDEANHCCISKMYNF |
| | | LMNYPEVTLSVFFSQLYHTENQFPTSAWNREALRGLASLWPQVTL |
| | | SAISGGIWQSILETFVSGISEGLTAVRPFTAGRTLTDRYNAYEINCIT |
| | | EVKPYFTDALHSWQKENQDQKVWAASENQPLHNTTPAQWQPDM |
| | | SQDCRTPAVFMLVPYRDLPPIHVNPSPQKPRTVVRHLNTLQLSASK |
| | | VKALRKSPSGRPVKKEEARKGSTRSQEANETNKSKWKKQTLFIKS |
| | | NICHLLEREQKKIGILSSWSV |
| rAPOBEC-1 (delta | 1421 | MSSETGPVAVDPTLRRRIEPHEFEVFFDPRELRKETCLLYEINWGG |
| 177-186) | | RHSIWRHTSQNTNKHVEVNFIEKFTTERYFCPNTRCSITWFLSWSP |
| polypeptide | | CGECSRAITEFLSRYPHVTLFIYIARLYHHADPRNRQGLRDLISSGVT |
| sequence | | IQIMTEQESGYCWRNFVNYSPSNEAHWPRYPHLWVRGLPPCLNIL |
| | | RRKQPQLTFFTIALQSCHYQRLPPHILWATGLK |
| rAPOBEC-1 (delta | 1422 | MSSETGPVAVDPTLRRRIEPHEFEVFFDPRELRKETCLLYEINWGG |
| 202-213) | | RHSIWRHTSQNTNKHVEVNFIEKFTTERYFCPNTRCSITWFLSWSP |
| polypeptide | | CGECSRAITEFLSRYPHVTLFIYIARLYHHADPRNRQGLRDLISSGVT |
| sequence | | IQIMTEQESGYCWRNFVNYSPSNEAHWPRYPHLWVRLYVLELYCII |
| | | LGLPPCLNILRRKQPQHYQRLPPHILWATGLK |
| mouse AID | 1373 | MDSLLMKQKKFLYHFKNVRWAKGRHETYLCYWKRRDSATSCSLD |
| (mAPOBEC-4) | | FGHLRNKSGCHVELLFLRYISDWDLDPGRCYRVTWFTSWSPCYDC |
| polypeptide | | ARHVAEFLRWNPNLSLRIFTARLYFCEDRKAEPEGLRRLHRAGVQI |
| sequence | | GIMTFKDYFYCWNTFVENRERTFKAWEGLHENSVRLTRQLRRILLP |
| | | LYEVDDLRDAFRMLGF |
| pmCDA-1 | 1417 | MAGYECVRVSEKLDFDTFEFQFENLHYATERHRTYVIFDVKPQSAG |
| polypeptide | | GRSRRLWGYHNNPNVCHAELILMSMIDRHLESNPGVYAMTWYMS |
| sequence | | WSPCANCSSKLNPWLKNLLEEQGHTLTMHFSRIYDRDREGDHRGL |
| | | RGLKHVSNSFRMGWGRAEVKECLAEYVEASRRTLTWLDTTESMA |
| | | AKMRRKLFCILVRCAGMRESGIPLHLFTLQTPLLSGRWVWVRV |
| pmCDA-2 | 1418 | MELREVVDCALASCVRHEPLSRVAFLRCFAAPSQKPRGTVILFYVE |
| polypeptide | | GAGRGVTGGHAVNYNKQGTSIHAEVLLLSAVRAALLRRRRCEDGE |
| sequence | | EATRGCTLHCYSTYSPCRDCVEYIQEFGASTGVRVVIHCCRLYELD |
| | | VNRRRSEAEGVLRSLSRLGRDFRLMGPRDAIALLLGGRLANTADG |
| | | ESGASGNAWVTETNVVEPLVDMTGFGDEDLHAQVQRNKQIREAY |
| | | ANYASAVSLMLGELHVDPDKFPFLAEFLAQTSVEPSGTPRETRGRP |
| | | RGASSRGPEIGRQRPADFERALGAYGLFLHPRIVSREADREEIKRD |
| | | LIVVMRKHNYQGP |
| pmCDA-5 | 1419 | MAGDENVRVSEKLDFDTFEFQFENLHYATERHRTYVIFDVKPQSAG |
| polypeptide | | GRSRRLWGYHNNPNVCHAELILMSMIDRHLESNPGVYAMTWYMS |
| sequence | | WSPCANCSSKLNPWLKNLLEEQGHTLMMHFSRIYDRDREGDHRG |
| | | LRGLKHVSNSFRMGWGRAEVKECLAEYVEASRRTLTWLDTTESM |
| | | AAKMRRKLFCILVRCAGMRESGMPLHLFT |
| yCD polypeptide | 1420 | MVTGGMASKWDQKGMDIAYEEAALGYKEGGVPIGGCLINNKDGSV |
| sequence | | LGRGHNMRFQKGSATLHGEISTLENCGRLEGKVYKDTTLYTTLSPC |
| | | DMCTGAIIMYGIPRCVVGENVNFKSKGEKYLQTRGHEWWDDER |
| | | CKKIMKQFIDERPQDWFEDIGE |
| NLS | 84 | KRTADGSEFESPKKKRKV |
| NLS | 85 | KRPAATKKAGQAKKKK |
| NLS | 86 | KKTELQTTNAENKTKKL |
| NLS | 87 | KRGINDRNFWRGENGRKTR |
| NLS | 88 | RKSGKIAAIVVKRPRK |
| NLS | 89 | PKKKRKV |
| NLS | 90 | MDSLLMNRRKFLYQFKNVRWAKGRRETYLC |
| WT cas9 domain | 223 | MDKKYSIGLDIGTNSVGWAVITDEYKVPSKKFKVLGNTDRHSIKKNL |
| | | IGALLFDSGETAEATRLKRTARRRYTRRKNRICYLQEIFSNEMAKVD |
| | | DSFFHRLEESFLVEEDKKHERHPIFGNIVDEVAYHEKYPTIYHLRKK |
| | | LVDSTDKADLRLIYLALAHMIKFRGHFLIEGDLNPDNSDVDKLFIQLV |
| | | QTYNQLFEENPINASGVDAKAILSARLSKSRRLENLIAQLPGEKKNG |
| | | LFGNLIALSLGLTPNFKSNFDLAEDAKLQLSKDTYDDDLDNLLAQIG |
| | | DQYADLFLAAKNLSDAILLSDILRVNTEITKAPLSASMIKRYDEHHQD |
| | | LTLLKALVRQQLPEKYKEIFFDQSKNGYAGYIDGGASQEEFYKFIKPI |
| | | LEKMDGTEELLVKLNREDLLRKQRTFDNGSIPHQIHLGELHAILRRQ |
| | | EDFYPFLKDNREKIEKILTFRIPYYVGPLARGNSRFAWMTRKSEETIT |
| | | PWNFEEVVDKGASAQSFIERMTNFDKNLPNEKVLPKHSLLYEYFTV |
| | | YNELTKVKYVTEGMRKPAFLSGEQKKAIVDLLFKTNRKVTVKQLKE |
| | | DYFKKIECFDSVEISGVEDRFNASLGTYHDLLKIIKDKDFLDNEENED |
| | | ILEDIVLTLTLFEDREMIEERLKTYAHLFDDKVMKQLKRRRYTGWGR |
| | | LSRKLINGIRDKQSGKTILDFLKSDGFANRNFMQLIHDDSLTFKEDIQ |
| | | KAQVSGQGDSLHEHIANLAGSPAIKKGILQTVKVVDELVKVMGRHK |
| | | PENIVIEMARENQTTQKGQKNSRERMKRIEEGIKELGSQILKEHPVE |
| | | NTQLQNEKLYLYYLQNGRDMYVDQELDINRLSDYDVDHIVPQSFLK |
| | | DDSIDNKVLTRSDKNRGKSDNVPSEEVVKKMKNYWRQLLNAKLITQ |
| | | RKFDNLTKAERGGLSELDKAGFIKRQLVETRQITKHVAQILDSRMNT |
| | | KYDENDKLIREVKVITLKSKLVSDFRKDFQFYKVREINNYHHAHDAY |
| | | LNAVVGTALIKKYPKLESEFVYGDYKVYDVRKMIAKSEQEIGKATAK |
| | | YFFYSNIMNFFKTEITLANGEIRKRPLIETNGETGEIVWDKGRDFATV |
| | | RKVLSMPQVNIVKKTEVQTGGFSKESILPKRNSDKLIARKKDWDPK |
| | | KYGGFDSPTVAYSVLVVAKVEKGKSKKLKSVKELLGITIMERSSFEK |
| | | NPIDFLEAKGYKEVKKDLIIKLPKYSLFELENGRKRMLASAGELQKG |
| | | NELALPSKYVNFLYLASHYEKLKGSPEDNEQKQLFVEQHKHYLDEII |
| | | EQISEFSKRVILADANLDKVLSAYNKHRDKPIREQAENIIHLFTLTNLG |
| | | APAAFKYFDTTIDRKRYTSTKEVLDATLIHQSITGLYETRIDLSQLGG |
| | | D |
| gRNA scaffold | 230 | GUUUUAGAGCUAGAAAUAGCAAGUUAAAAUAAGGCUAGUCCGU |
| nucleotide | | UAUCAACUUGAAAAAGUGGGACCGAGUCGGUGCUUUU |
| sequence | | |
| wild type spCas9 | 231 | ATGGATAAGAAATACTCAATAGGCTTAGATATCGGCACAAATAGC |
| polynucleotide | | GTCGGATGGGCGGTGATCACTGATGATTATAAGGTTCCGTCTAA |
| sequence | | AAAGTTCAAGGTTCTGGGAAATACAGACCGCCACAGTATCAAAA |
| | | AAAATCTTATAGGGGCTCTTTTATTTGGCAGTGGAGAGACAGCG |
| | | GAAGCGACTCGTCTCAAACGGACAGCTCGTAGAAGGTATACAC |
| | | GTCGGAAGAATCGTATTTGTTATCTACAGGAGATTTTTTCAAATG |
| | | AGATGGCGAAAGTAGATGATAGTTTCTTTCATCGACTTGAAGAGT |
| | | CTTTTTTGGTGGAAGAAGACAAGAAGCATGAACGTCATCCTATTT |
| | | TTGGAAATATAGTAGATGAAGTTGCTTATCATGAGAAATATCCAA |
| | | CTATCTATCATCTGCGAAAAAAATTGGCAGATTCTACTGATAAAG |
| | | CGGATTTGCGCTTAATCTATTTGGCCTTAGCGCATATGATTAAGT |
| | | TTCGTGGTCATTTTTTGATTGAGGGAGATTTAAATCCTGATAATA |
| | | GTGATGTGGACAAACTATTTATCCAGTTGGTACAAATCTACAATC |
| | | AATTATTTGAAGAAAACCCTATTAACGCAAGTAGAGTAGATGCTA |
| | | AAGCGATTCTTTCTGCACGATTGAGTAAATCAAGACGATTAGAAA |
| | | ATCTCATTGCTCAGCTCCCCGGTGAGAAGAGAAATGGCTTGTTT |
| | | GGGAATCTCATTGCTTTGTCATTGGGATTGACCCCTAATTTTAAA |
| | | TCAAATTTTGATTTGGCAGAAGATGCTAAATTACAGCTTTCAAAA |
| | | GATACTTACGATGATGATTTAGATAATTTATTGGCGCAAATTGGA |
| | | GATCAATATGCTGATTTGTTTTTGGCAGCTAAGAATTTATCAGAT |
| | | GCTATTTTACTTTCAGATATCCTAAGAGTAAATAGTGAAATAACTA |
| | | AGGCTCCCCTATCAGCTTCAATGATTAAGCGCTACGATGAACAT |
| | | CATCAAGACTTGACTCTTTTAAAAGCTTTAGTTCGACAACAACTT |
| | | CCAGAAAAGTATAAAGAAATCTTTTTTGATCAATCAAAAAACGGA |
| | | TATGCAGGTTATATTGATGGGGGAGCTAGCCAAGAAGAATTTTA |
| | | TAAATTTATCAAACCAATTTTAGAAAAAATGGATGGTACTGAGGA |
| | | ATTATTGGTGAAACTAAATCGTGAAGATTTGCTGCGCAAGCAAC |
| | | GGACCTTTGACAACGGCTCTATTCCCCATCAAATTCACTTGGGT |
| | | GAGCTGCATGCTATTTTGAGAAGACAAGAAGACTTTTATCCATTT |
| | | TTAAAAGACAATCGTGAGAAGATTGAAAAAATCTTGACTTTTCGA |
| | | ATTCCTTATTATGTTGGTCCATTGGCGCGTGGCAATAGTCGTTTT |
| | | GCATGGATGACTCGGAAGTCTGAAGAAACAATTACCCCATGGAA |
| | | TTTTGAAGAAGTTGTCGATAAAGGTGCTTCAGCTCAATCATTTAT |
| | | TGAACGCATGACAAACTTTGATAAAAATCTTCCAAATGAAAAAGT |
| | | ACTACCAAAACATAGTTTGCTTTATGAGTATTTTACGGTTTATAAC |
| | | GAATTGACAAAGGTCAAATATGTTACTGAGGGAATGCGAAAACC |
| | | AGCATTTCTTTCAGGTGAACAGAAGAAAGCCATTGTTGATTTACT |
| | | CTTCAAAACAAATCGAAAAGTAACCGTTAAGCAATTAAAAGAAGA |
| | | TTATTTCAAAAAAATAGAATGTTTTGATAGTGTTGAAATTTCAGGA |
| | | GTTGAAGATAGATTTAATGCTTCATTAGGCGCCTACCATGATTTG |
| | | CTAAAAATTATTAAAGATAAAGATTTTTTGGATAATGAAGAAAATG |
| | | AAGATATCTTAGAGGATATTGTTTTAACATTGACCTTATTTGAAGA |
| | | TAGGGGGATGATTGAGGAAAGACTTAAAACATATGCTCACCTCT |
| | | TTGATGATAAGGTGATGAAACAGCTTAAACGTCGCCGTTATACT |
| | | GGTTGGGGACGTTTGTCTCGAAAATTGATTAATGGTATTAGGGA |
| | | TAAGCAATCTGGCAAAACAATATTAGATTTTTTGAAATCAGATGG |
| | | TTTTGCCAATCGCAATTTTATGCAGCTGATCCATGATGATAGTTT |
| | | GACATTTAAAGAAGATATTCAAAAAGCACAGGTGTCTGGACAAG |
| | | GCCATAGTTTACATGAACAGATTGCTAACTTAGCTGGCAGTCCT |
| | | GCTATTAAAAAAGGTATTTTACAGACTGTAAAAATTGTTGATGAA |
| | | CTGGTCAAAGTAATGGGGCATAAGCCAGAAAATATCGTTATTGA |
| | | AATGGCACGTGAAAATCAGACAACTCAAAAGGGCCAGAAAAATT |
| | | CGCGAGAGCGTATGAAACGAATCGAAGAAGGTATCAAAGAATTA |
| | | GGAAGTCAGATTCTTAAAGAGCATCCTGTTGAAAATACTCAATTG |
| | | CAAAATGAAAAGCTCTATCTCTATTATCTACAAAATGGAAGAGAC |
| | | ATGTATGTGGACCAAGAATTAGATATTAATCGTTTAAGTGATTAT |
| | | GATGTCGATCACATTGTTCCACAAAGTTTCATTAAAGACGATTCA |
| | | ATAGACAATAAGGTACTAACGCGTTCTGATAAAAATCGTGGTAAA |
| | | TCGGATAACGTTCCAAGTGAAGAAGTAGTCAAAAAGATGAAAAA |
| | | CTATTGGAGACAACTTCTAAACGCCAAGTTAATCACTCAACGTAA |
| | | GTTTGATAATTTAACGAAAGCTGAACGTGGAGGTTTGAGTGAAC |
| | | TTGATAAAGCTGGTTTTATCAAACGCCAATTGGTTGAAACTCGCC |
| | | AAATCACTAAGCATGTGGCACAAATTTTGGATAGTCGCATGAATA |
| | | CTAAATACGATGAAAATGATAAACTTATTCGAGAGGTTAAAGTGA |
| | | TTACCTTAAAATCTAAATTAGTTTCTGACTTCCGAAAAGATTTCCA |
| | | ATTCTATAAAGTACGTGAGATTAACAATTACCATCATGCCCATGA |
| | | TGCGTATCTAAATGCCGTCGTTGGAACTGCTTTGATTAAGAAATA |
| | | TCCAAAACTTGAATCGGAGTTTGTCTATGGTGATTATAAAGTTTA |
| | | TGATGTTCGTAAAATGATTGCTAAGTCTGAGCAAGAAATAGGCAA |
| | | AGCAACCGCAAAATATTTCTTTTACTCTAATATCATGAACTTCTTC |
| | | AAAACAGAAATTACACTTGCAAATGGAGAGATTCGCAAACGCCC |
| | | TCTAATCGAAACTAATGGGGAAACTGGAGAAATTGTCTGGGATA |
| | | AAGGGCGAGATTTTGCCACAGTGCGCAAAGTATTGTCCATGCCC |
| | | CAAGTCAATATTGTCAAGAAAACAGAAGTACAGACAGGCGGATT |
| | | CTCCAAGGAGTCAATTTTACCAAAAAGAAATTCGGACAAGCTTAT |
| | | TGCTCGTAAAAAAGACTGGGATCCAAAAAAATATGGTGGTTTTGA |
| | | TAGTCCAACGGTAGCTTATTCAGTCCTAGTGGTTGCTAAGGTGG |
| | | AAAAAGGGAAATCGAAGAAGTTAAAATCCGTTAAAGAGTTACTAG |
| | | GGATCACAATTATGGAAAGAAGTTCCTTTGAAAAAAATCCGATTG |
| | | ACTTTTTAGAAGCTAAAGGATATAAGGAAGTTAAAAAAGACTTAA |
| | | TCATTAAACTACCTAAATATAGTCTTTTTGAGTTAGAAAACGGTC |
| | | GTAAACGGATGCTGGCTAGTGCCGGAGAATTACAAAAAGGAAAT |
| | | GAGCTGGCTCTGCCAAGCAAATATGTGAATTTTTTATATTTAGCT |
| | | AGTCATTATGAAAAGTTGAAGGGTAGTCCAGAAGATAACGAACA |
| | | AAAACAATTGTTTGTGGAGCAGCATAAGCATTATTTAGATGAGAT |
| | | TATTGAGCAAATCAGTGAATTTTCTAAGCGTGTTATTTTAGCAGA |
| | | TGCCAATTTAGATAAAGTTCTTAGTGCATATAACAAACATAGAGA |
| | | CAAACCAATACGTGAACAAGCAGAAAATATTATTCATTTATTTAC |
| | | GTTGACGAATCTTGGAGCTCCCGCTGCTTTTAAATATTTTGATAC |
| | | AACAATTGATCGTAAACGATATACGTCTACAAAAGAAGTTTTAGA |
| | | TGCCACTCTTATCCATCAATCCATCACTGGTCTTTATGAAACACG |
| | | CATTGATTTGAGTCAGCTAGGAGGTGACTGA |
| spCas9 polypeptide | 232 | MDKKYSIGLDIGTNSVGWAVITDDYKVPSKKFKVLGNTDRHSIKKNL |
| sequence | | IGALLFGSGETAEATRLKRTARRRYTRRKNRICYLQEIFSNEMAKVD |
| | | DSFFHRLEESFLVEEDKKHERHPIFGNIVDEVAYHEKYPTIYHLRKK |
| | | LADSTDKADLRLIYLALAHMIKFRGHFLIEGDLNPDNSDVDKLFIQLV |
| | | QIYNQLFEENPINASRVDAKAILSARLSKSRRLENLIAQLPGEKRNGL |
| | | FGNLIALSLGLTPNFKSNFDLAEDAKLQLSKDTYDDDLDNLLAQIGD |
| | | QYADLFLAAKNLSDAILLSDILRVNSEITKAPLSASMIKRYDEHHQDL |
| | | TLLKALVRQQLPEKYKEIFFDQSKNGYAGYIDGGASQEEFYKFIKPIL |
| | | EKMDGTEELLVKLNREDLLRKQRTFDNGSIPHQIHLGELHAILRRQE |
| | | DFYPFLKDNREKIEKILTFRIPYYVGPLARGNSRFAWMTRKSEETITP |
| | | WNFEEVVDKGASAQSFIERMTNFDKNLPNEKVLPKHSLLYEYFTVY |
| | | NELTKVKYVTEGMRKPAFLSGEQKKAIVDLLFKTNRKVTVKQLKED |
| | | YFKKIECFDSVEISGVEDRFNASLGAYHDLLKIIKDKDFLDNEENEDI |
| | | LEDIVLTLTLFEDRGMIEERLKTYAHLFDDKVMKQLKRRRYTGWGR |
| | | LSRKLINGIRDKQSGKTILDFLKSDGFANRNFMQLIHDDSLTFKEDIQ |
| | | KAQVSGQGHSLHEQIANLAGSPAIKKGILQTVKIVDELVKVMGHKPE |
| | | NMEMARENQTTQKGQKNSRERMKRIEEGIKELGSQILKEHPVENT |
| | | QLQNEKLYLYYLQNGRDMYVDQELDINRLSDYDVDHIVPQSFIKDD |
| | | SIDNKVLTRSDKNRGKSDNVPSEEVVKKMKNYWRQLLNAKLITQRK |
| | | FDNLTKAERGGLSELDKAGFIKRQLVETRQITKHVAQILDSRMNTKY |
| | | DENDKLIREVKVITLKSKLVSDFRKDFQFYKVREINNYHHAHDAYLN |
| | | AWGTALIKKYPKLESEFVYGDYKVYDVRKMIAKSEQEIGKATAKYF |
| | | FYSNIMNFFKTEITLANGEIRKRPLIETNGETGEIVWDKGRDFATVRK |
| | | VLSMPQVNIVKKTEVQTGGFSKESILPKRNSDKLIARKKDWDPKKY |
| | | GGFDSPTVAYSVLVVAKVEKGKSKKLKSVKELLGITIMERSSFEKNP |
| | | IDFLEAKGYKEVKKDLIIKLPKYSLFELENGRKRMLASAGELQKGNE |
| | | LALPSKYVNFLYLASHYEKLKGSPEDNEQKQLFVEQHKHYLDEIIEQ |
| | | ISEFSKRVILADANLDKVLSAYNKHRDKPIREQAENIIHLFTLTNLGAP |
| | | AAFKYFDTTIDRKRYTSTKEVLDATLIHQSITGLYETRIDLSQLGGD |
| wild-type Cas9 | 235 | ATGGATAAAAAGTATTCTATTGGTTTAGACATCGGCACTAATTCC |
| polynucleotide | | GTTGGATGGGCTGTCATAACCGATGAATACAAAGTACCTTCAAA |
| sequence | | GAAATTTAAGGTGTTGGGGAACACAGACCGTCATTCGATTAAAA |
| | | AGAATCTTATCGGTGCCCTCCTATTCGATAGTGGCGAAACGGCA |
| | | GAGGCGACTCGCCTGAAACGAACCGCTCGGAGAAGGTATACAC |
| | | GTCGCAAGAACCGAATATGTTACTTACAAGAAATTTTTAGCAATG |
| | | AGATGGCCAAAGTTGACGATTCTTTCTTTCACCGTTTGGAAGAGT |
| | | CCTTCCTTGTCGAAGAGGACAAGAAACATGAACGGCACCCCATC |
| | | TTTGGAAACATAGTAGATGAGGTGGCATATCATGAAAAGTACCC |
| | | AACGATTTATCACCTCAGAAAAAAGCTAGTTGACTCAACTGATAA |
| | | AGCGGACCTGAGGTTAATCTACTTGGCTCTTGCCCATATGATAA |
| | | AGTTCCGTGGGCACTTTCTCATTGAGGGTGATCTAAATCCGGAC |
| | | AACTCGGATGTCGACAAACTGTTCATCCAGTTAGTACAAACCTAT |
| | | AATCAGTTGTTTGAAGAGAACCCTATAAATGCAAGTGGCGTGGA |
| | | TGCGAAGGCTATTCTTAGCGCCCGCCTCTCTAAATCCCGACGGC |
| | | TAGAAAACCTGATCGCACAATTACCCGGAGAGAAGAAAAATGGG |
| | | TTGTTCGGTAACCTTATAGCGCTCTCACTAGGCCTGACACCAAA |
| | | TTTTAAGTCGAACTTCGACTTAGCTGAAGATGCCAAATTGCAGCT |
| | | TAGTAAGGACACGTACGATGACGATCTCGACAATCTACTGGCAC |
| | | AAATTGGAGATCAGTATGCGGACTTATTTTTGGCTGCCAAAAACC |
| | | TTAGCGATGCAATCCTCCTATCTGACATACTGAGAGTTAATACTG |
| | | AGATTACCAAGGCGCCGTTATCCGCTTCAATGATCAAAAGGTAC |
| | | GATGAACATCACCAAGACTTGACACTTCTCAAGGCCCTAGTCCG |
| | | TCAGCAACTGCCTGAGAAATATAAGGAAATATTCTTTGATCAGTC |
| | | GAAAAACGGGTACGCAGGTTATATTGACGGCGGAGCGAGTCAA |
| | | GAGGAATTCTACAAGTTTATCAAACCCATATTAGAGAAGATGGAT |
| | | GGGACGGAAGAGTTGCTTGTAAAACTCAATCGCGAAGATCTACT |
| | | GCGAAAGCAGCGGACTTTCGACAACGGTAGCATTCCACATCAAA |
| | | TCCACTTAGGCGAATTGCATGCTATACTTAGAAGGCAGGAGGAT |
| | | TTTTATCCGTTCCTCAAAGACAATCGTGAAAAGATTGAGAAAATC |
| | | CTAACCTTTCGCATACCTTACTATGTGGGACCCCTGGCCCGAGG |
| | | GAACTCTCGGTTCGCATGGATGACAAGAAAGTCCGAAGAAACGA |
| | | TTACTCCATGGAATTTTGAGGAAGTTGTCGATAAAGGTGCGTCA |
| | | GCTCAATCGTTCATCGAGAGGATGACCAACTTTGACAAGAATTTA |
| | | CCGAACGAAAAAGTATTGCCTAAGCACAGTTTACTTTACGAGTAT |
| | | TTCACAGTGTACAATGAACTCACGAAAGTTAAGTATGTCACTGAG |
| | | GGCATGCGTAAACCCGCCTTTCTAAGCGGAGAACAGAAGAAAG |
| | | CAATAGTAGATCTGTTATTCAAGACCAACCGCAAAGTGACAGTTA |
| | | AGCAATTGAAAGAGGACTACTTTAAGAAAATTGAATGCTTCGATT |
| | | CTGTCGAGATCTCCGGGGTAGAAGATCGATTTAATGCGTCACTT |
| | | GGTACGTATCATGACCTCCTAAAGATAATTAAAGATAAGGACTTC |
| | | CTGGATAACGAAGAGAATGAAGATATCTTAGAAGATATAGTGTTG |
| | | ACTCTTACCCTCTTTGAAGATCGGGAAATGATTGAGGAAAGACT |
| | | AAAAACATACGCTCACCTGTTCGACGATAAGGTTATGAAACAGTT |
| | | AAAGAGGCGTCGCTATACGGGCTGGGGACGATTGTCGCGGAAA |
| | | CTTATCAACGGGATAAGAGACAAGCAAAGTGGTAAAACTATTCT |
| | | CGATTTTCTAAAGAGCGACGGCTTCGCCAATAGGAACTTTATGC |
| | | AGCTGATCCATGATGACTCTTTAACCTTCAAAGAGGATATACAAA |
| | | AGGCACAGGTTTCCGGACAAGGGGACTCATTGCACGAACATATT |
| | | GCGAATCTTGCTGGTTCGCCAGCCATCAAAAAGGGCATACTCCA |
| | | GACAGTCAAAGTAGTGGATGAGCTAGTTAAGGTCATGGGACGTC |
| | | ACAAACCGGAAAACATTGTAATCGAGATGGCACGCGAAAATCAA |
| | | ACGACTCAGAAGGGGCAAAAAAACAGTCGAGAGCGGATGAAGA |
| | | GAATAGAAGAGGGTATTAAAGAACTGGGCAGCCAGATCTTAAAG |
| | | GAGCATCCTGTGGAAAATACCCAATTGCAGAACGAGAAACTTTA |
| | | CCTCTATTACCTACAAAATGGAAGGGACATGTATGTTGATCAGG |
| | | AACTGGACATAAACCGTTTATCTGATTACGACGTCGATCACATTG |
| | | TACCCCAATCCTTTTTGAAGGACGATTCAATCGACAATAAAGTGC |
| | | TTACACGCTCGGATAAGAACCGAGGGAAAAGTGACAATGTTCCA |
| | | AGCGAGGAAGTCGTAAAGAAAATGAAGAACTATTGGCGGCAGCT |
| | | CCTAAATGCGAAACTGATAACGCAAAGAAAGTTCGATAACTTAAC |
| | | TAAAGCTGAGAGGGGTGGCTTGTCTGAACTTGACAAGGCCGGA |
| | | TTTATTAAACGTCAGCTCGTGGAAACCCGCCAAATCACAAAGCA |
| | | TGTTGCACAGATACTAGATTCCCGAATGAATACGAAATACGACG |
| | | AGAACGATAAGCTGATTCGGGAAGTCAAAGTAATCACTTTAAAGT |
| | | CAAAATTGGTGTCGGACTTCAGAAAGGATTTTCAATTCTATAAAG |
| | | TTAGGGAGATAAATAACTACCACCATGCGCACGACGCTTATCTT |
| | | AATGCCGTCGTAGGGACCGCACTCATTAAGAAATACCCGAAGCT |
| | | AGAAAGTGAGTTTGTGTATGGTGATTACAAAGTTTATGACGTCCG |
| | | TAAGATGATCGCGAAAAGCGAACAGGAGATAGGCAAGGCTACA |
| | | GCCAAATACTTCTTTTATTCTAACATTATGAATTTCTTTAAGACGG |
| | | AAATCACTCTGGCAAACGGAGAGATACGCAAACGACCTTTAATT |
| | | GAAACCAATGGGGAGACAGGTGAAATCGTATGGGATAAGGGCC |
| | | GGGACTTCGCGACGGTGAGAAAAGTTTTGTCCATGCCCCAAGTC |
| | | AACATAGTAAAGAAAACTGAGGTGCAGACCGGAGGGTTTTCAAA |
| | | GGAATCGATTCTTCCAAAAAGGAATAGTGATAAGCTCATCGCTC |
| | | GTAAAAAGGACTGGGACCCGAAAAAGTACGGTGGCTTCGATAG |
| | | CCCTACAGTTGCCTATTCTGTCCTAGTAGTGGCAAAAGTTGAGA |
| | | AGGGAAAATCCAAGAAACTGAAGTCAGTCAAAGAATTATTGGGG |
| | | ATAACGATTATGGAGCGCTCGTCTTTTGAAAAGAACCCCATCGA |
| | | CTTCCTTGAGGCGAAAGGTTACAAGGAAGTAAAAAAGGATCTCA |
| | | TAATTAAACTACCAAAGTATAGTCTGTTTGAGTTAGAAAATGGCC |
| | | GAAAACGGATGTTGGCTAGCGCCGGAGAGCTTCAAAAGGGGAA |
| | | CGAACTCGCACTACCGTCTAAATACGTGAATTTCCTGTATTTAGC |
| | | GTCCCATTACGAGAAGTTGAAAGGTTCACCTGAAGATAACGAAC |
| | | AGAAGCAACTTTTTGTTGAGCAGCACAAACATTATCTCGACGAAA |
| | | TCATAGAGCAAATTTCGGAATTCAGTAAGAGAGTCATCCTAGCT |
| | | GATGCCAATCTGGACAAAGTATTAAGCGCATACAACAAGCACAG |
| | | GGATAAACCCATACGTGAGCAGGCGGAAAATATTATCCATTTGT |
| | | TTACTCTTACCAACCTCGGCGCTCCAGCCGCATTCAAGTATTTTG |
| | | ACACAACGATAGATCGCAAACGATACACTTCTACCAAGGAGGTG |
| | | CTAGACGCGACACTGATTCACCAATCCATCACGGGATTATATGA |
| | | AACTCGGATAGATTTGTCACAGCTTGGGGGTGACGGATCCCCCA |
| | | AGAAGAAGAGGAAAGTCTCGAGCGACTACAAAGACCATGACGG |
| | | TGATTATAAAGATCATGACATCGATTACAAGGATGACGATGACAA |
| | | GGCTGCAGGA |
| wild-type Cas9 | 236 | MDKKYSIGLAIGTNSVGWAVITDEYKVPSKKFKVLGNTDRHSIKKNLI |
| polypeptide | | GALLFDSGETAEATRLKRTARRRYTRRKNRICYLQEIFSNEMAKVD |
| sequence | | DSFFHRLEESFLVEEDKKHERHPIFGNIVDEVAYHEKYPTIYHLRKK |
| | | LVDSTDKADLRLIYLALAHMIKFRGHFLIEGDLNPDNSDVDKLFIQLV |
| | | QTYNQLFEENPINASGVDAKAILSARLSKSRRLENLIAQLPGEKKNG |
| | | LFGNLIALSLGLTPNFKSNFDLAEDAKLQLSKDTYDDDLDNLLAQIG |
| | | DQYADLFLAAKNLSDAILLSDILRVNTEITKAPLSASMIKRYDEHHQD |
| | | LTLLKALVRQQLPEKYKEIFFDQSKNGYAGYIDGGASQEEFYKFIKPI |
| | | LEKMDGTEELLVKLNREDLLRKQRTFDNGSIPHQIHLGELHAILRRQ |
| | | EDFYPFLKDNREKIEKILTFRIPYYVGPLARGNSRFAWMTRKSEETIT |
| | | PWNFEEVVDKGASAQSFIERMTNFDKNLPNEKVLPKHSLLYEYFTV |
| | | YNELTKVKYVTEGMRKPAFLSGEQKKAIVDLLFKTNRKVTVKQLKE |
| | | DYFKKIECFDSVEISGVEDRFNASLGTYHDLLKIIKDKDFLDNEENED |
| | | ILEDIVLTLTLFEDREMIEERLKTYAHLFDDKVMKQLKRRRYTGWGR |
| | | LSRKLINGIRDKQSGKTILDFLKSDGFANRNFMQLIHDDSLTFKEDIQ |
| | | KAQVSGQGDSLHEHIANLAGSPAIKKGILQTVKVVDELVKVMGRHK |
| | | PENIVIEMARENQTTQKGQKNSRERMKRIEEGIKELGSQILKEHPVE |
| | | NTQLQNEKLYLYYLQNGRDMYVDQELDINRLSDYDVDHIVPQSFLK |
| | | DDSIDNKVLTRSDKNRGKSDNVPSEEVVKKMKNYWRQLLNAKLITQ |
| | | RKFDNLTKAERGGLSELDKAGFIKRQLVETRQITKHVAQILDSRMNT |
| | | KYDENDKLIREVKVITLKSKLVSDFRKDFQFYKVREINNYHHAHDAY |
| | | LNAWGTALIKKYPKLESEFVYGDYKVYDVRKMIAKSEQEIGKATAK |
| | | YFFYSNIMNFFKTEITLANGEIRKRPLIETNGETGEIVWDKGRDFATV |
| | | RKVLSMPQVNIVKKTEVQTGGFSKESILPKRNSDKLIARKKDWDPK |
| | | KYGGFDSPTVAYSVLVVAKVEKGKSKKLKSVKELLGITIMERSSFEK |
| | | NPIDFLEAKGYKEVKKDLIIKLPKYSLFELENGRKRMLASAGELQKG |
| | | NELALPSKYVNFLYLASHYEKLKGSPEDNEQKQLFVEQHKHYLDEII |
| | | EQISEFSKRVILADANLDKVLSAYNKHRDKPIREQAENIIHLFTLTNLG |
| | | APAAFKYFDTTIDRKRYTSTKEVLDATLIHQSITGLYETRIDLSQLGG |
| | | D |
| Cas9 from | 237 | ATGGATAAGAAATACTCAATAGGCTTAGATATCGGCACAAATAGC |
| Streptococcus | | GTCGGATGGGCGGTGATCACTGATGAATATAAGGTTCCGTCTAA |
| pyogenes (NCBI | | AAAGTTCAAGGTTCTGGGAAATACAGACCGCCACAGTATCAAAA |
| Ref. Seq.: | | AAAATCTTATAGGGGCTCTTTTATTTGACAGTGGAGAGACAGCG |
| NC_002737.2) | | GAAGCGACTCGTCTCAAACGGACAGCTCGTAGAAGGTATACAC |
| polynucleotide | | GTCGGAAGAATCGTATTTGTTATCTACAGGAGATTTTTTCAAATG |
| sequence | | AGATGGCGAAAGTAGATGATAGTTTCTTTCATCGACTTGAAGAGT |
| | | CTTTTTTGGTGGAAGAAGACAAGAAGCATGAACGTCATCCTATTT |
| | | TTGGAAATATAGTAGATGAAGTTGCTTATCATGAGAAATATCCAA |
| | | CTATCTATCATCTGCGAAAAAAATTGGTAGATTCTACTGATAAAG |
| | | CGGATTTGCGCTTAATCTATTTGGCCTTAGCGCATATGATTAAGT |
| | | TTCGTGGTCATTTTTTGATTGAGGGAGATTTAAATCCTGATAATA |
| | | GTGATGTGGACAAACTATTTATCCAGTTGGTACAAACCTACAATC |
| | | AATTATTTGAAGAAAACCCTATTAACGCAAGTGGAGTAGATGCTA |
| | | AAGCGATTCTTTCTGCACGATTGAGTAAATCAAGACGATTAGAAA |
| | | ATCTCATTGCTCAGCTCCCCGGTGAGAAGAAAAATGGCTTATTT |
| | | GGGAATCTCATTGCTTTGTCATTGGGTTTGACCCCTAATTTTAAA |
| | | TCAAATTTTGATTTGGCAGAAGATGCTAAATTACAGCTTTCAAAA |
| | | GATACTTACGATGATGATTTAGATAATTTATTGGCGCAAATTGGA |
| | | GATCAATATGCTGATTTGTTTTTGGCAGCTAAGAATTTATCAGAT |
| | | GCTATTTTACTTTCAGATATCCTAAGAGTAAATACTGAAATAACTA |
| | | AGGCTCCCCTATCAGCTTCAATGATTAAACGCTACGATGAACAT |
| | | CATCAAGACTTGACTCTTTTAAAAGCTTTAGTTCGACAACAACTT |
| | | CCAGAAAAGTATAAAGAAATCTTTTTTGATCAATCAAAAAACGGA |
| | | TATGCAGGTTATATTGATGGGGGAGCTAGCCAAGAAGAATTTTA |
| | | TAAATTTATCAAACCAATTTTAGAAAAAATGGATGGTACTGAGGA |
| | | ATTATTGGTGAAACTAAATCGTGAAGATTTGCTGCGCAAGCAAC |
| | | GGACCTTTGACAACGGCTCTATTCCCCATCAAATTCACTTGGGT |
| | | GAGCTGCATGCTATTTTGAGAAGACAAGAAGACTTTTATCCATTT |
| | | TTAAAAGACAATCGTGAGAAGATTGAAAAAATCTTGACTTTTCGA |
| | | ATTCCTTATTATGTTGGTCCATTGGCGCGTGGCAATAGTCGTTTT |
| | | GCATGGATGACTCGGAAGTCTGAAGAAACAATTACCCCATGGAA |
| | | TTTTGAAGAAGTTGTCGATAAAGGTGCTTCAGCTCAATCATTTAT |
| | | TGAACGCATGACAAACTTTGATAAAAATCTTCCAAATGAAAAAGT |
| | | ACTACCAAAACATAGTTTGCTTTATGAGTATTTTACGGTTTATAAC |
| | | GAATTGACAAAGGTCAAATATGTTACTGAAGGAATGCGAAAACC |
| | | AGCATTTCTTTCAGGTGAACAGAAGAAAGCCATTGTTGATTTACT |
| | | CTTCAAAACAAATCGAAAAGTAACCGTTAAGCAATTAAAAGAAGA |
| | | TTATTTCAAAAAAATAGAATGTTTTGATAGTGTTGAAATTTCAGGA |
| | | GTTGAAGATAGATTTAATGCTTCATTAGGTACCTACCATGATTTG |
| | | CTAAAAATTATTAAAGATAAAGATTTTTTGGATAATGAAGAAAATG |
| | | AAGATATCTTAGAGGATATTGTTTTAACATTGACCTTATTTGAAGA |
| | | TAGGGAGATGATTGAGGAAAGACTTAAAACATATGCTCACCTCTT |
| | | TGATGATAAGGTGATGAAACAGCTTAAACGTCGCCGTTATACTG |
| | | GTTGGGGACGTTTGTCTCGAAAATTGATTAATGGTATTAGGGATA |
| | | AGCAATCTGGCAAAACAATATTAGATTTTTTGAAATCAGATGGTT |
| | | TTGCCAATCGCAATTTTATGCAGCTGATCCATGATGATAGTTTGA |
| | | CATTTAAAGAAGACATTCAAAAAGCACAAGTGTCTGGACAAGGC |
| | | GATAGTTTACATGAACATATTGCAAATTTAGCTGGTAGCCCTGCT |
| | | ATTAAAAAAGGTATTTTACAGACTGTAAAAGTTGTTGATGAATTG |
| | | GTCAAAGTAATGGGGCGGCATAAGCCAGAAAATATCGTTATTGA |
| | | AATGGCACGTGAAAATCAGACAACTCAAAAGGGCCAGAAAAATT |
| | | CGCGAGAGCGTATGAAACGAATCGAAGAAGGTATCAAAGAATTA |
| | | GGAAGTCAGATTCTTAAAGAGCATCCTGTTGAAAATACTCAATTG |
| | | CAAAATGAAAAGCTCTATCTCTATTATCTCCAAAATGGAAGAGAC |
| | | ATGTATGTGGACCAAGAATTAGATATTAATCGTTTAAGTGATTAT |
| | | GATGTCGATCACATTGTTCCACAAAGTTTCCTTAAAGACGATTCA |
| | | ATAGACAATAAGGTCTTAACGCGTTCTGATAAAAATCGTGGTAAA |
| | | TCGGATAACGTTCCAAGTGAAGAAGTAGTCAAAAAGATGAAAAA |
| | | CTATTGGAGACAACTTCTAAACGCCAAGTTAATCACTCAACGTAA |
| | | GTTTGATAATTTAACGAAAGCTGAACGTGGAGGTTTGAGTGAAC |
| | | TTGATAAAGCTGGTTTTATCAAACGCCAATTGGTTGAAACTCGCC |
| | | AAATCACTAAGCATGTGGCACAAATTTTGGATAGTCGCATGAATA |
| | | CTAAATACGATGAAAATGATAAACTTATTCGAGAGGTTAAAGTGA |
| | | TTACCTTAAAATCTAAATTAGTTTCTGACTTCCGAAAAGATTTCCA |
| | | ATTCTATAAAGTACGTGAGATTAACAATTACCATCATGCCCATGA |
| | | TGCGTATCTAAATGCCGTCGTTGGAACTGCTTTGATTAAGAAATA |
| | | TCCAAAACTTGAATCGGAGTTTGTCTATGGTGATTATAAAGTTTA |
| | | TGATGTTCGTAAAATGATTGCTAAGTCTGAGCAAGAAATAGGCAA |
| | | AGCAACCGCAAAATATTTCTTTTACTCTAATATCATGAACTTCTTC |
| | | AAAACAGAAATTACACTTGCAAATGGAGAGATTCGCAAACGCCC |
| | | TCTAATCGAAACTAATGGGGAAACTGGAGAAATTGTCTGGGATA |
| | | AAGGGCGAGATTTTGCCACAGTGCGCAAAGTATTGTCCATGCCC |
| | | CAAGTCAATATTGTCAAGAAAACAGAAGTACAGACAGGCGGATT |
| | | CTCCAAGGAGTCAATTTTACCAAAAAGAAATTCGGACAAGCTTAT |
| | | TGCTCGTAAAAAAGACTGGGATCCAAAAAAATATGGTGGTTTTGA |
| | | TAGTCCAACGGTAGCTTATTCAGTCCTAGTGGTTGCTAAGGTGG |
| | | AAAAAGGGAAATCGAAGAAGTTAAAATCCGTTAAAGAGTTACTAG |
| | | GGATCACAATTATGGAAAGAAGTTCCTTTGAAAAAAATCCGATTG |
| | | ACTTTTTAGAAGCTAAAGGATATAAGGAAGTTAAAAAAGACTTAA |
| | | TCATTAAACTACCTAAATATAGTCTTTTTGAGTTAGAAAACGGTC |
| | | GTAAACGGATGCTGGCTAGTGCCGGAGAATTACAAAAAGGAAAT |
| | | GAGCTGGCTCTGCCAAGCAAATATGTGAATTTTTTATATTTAGCT |
| | | AGTCATTATGAAAAGTTGAAGGGTAGTCCAGAAGATAACGAACA |
| | | AAAACAATTGTTTGTGGAGCAGCATAAGCATTATTTAGATGAGAT |
| | | TATTGAGCAAATCAGTGAATTTTCTAAGCGTGTTATTTTAGCAGA |
| | | TGCCAATTTAGATAAAGTTCTTAGTGCATATAACAAACATAGAGA |
| | | CAAACCAATACGTGAACAAGCAGAAAATATTATTCATTTATTTAC |
| | | GTTGACGAATCTTGGAGCTCCCGCTGCTTTTAAATATTTTGATAC |
| | | AACAATTGATCGTAAACGATATACGTCTACAAAAGAAGTTTTAGA |
| | | TGCCACTCTTATCCATCAATCCATCACTGGTCTTTATGAAACACG |
| | | CATTGATTTGAGTCAGCTAGGAGGTGACTGA |
| catalytically | 238 | MDKKYSIGLAIGTNSVGWAVITDEYKVPSKKFKVLGNTDRHSIKKNLI |
| inactive | | GALLFDSGETAEATRLKRTARRRYTRRKNRICYLQEIFSNEMAKVD |
| Cas9 (dCas9) | | DSFFHRLEESFLVEEDKKHERHPIFGNIVDEVAYHEKYPTIYHLRKK |
| polypeptide | | LVDSTDKADLRLIYLALAHMIKFRGHFLIEGDLNPDNSDVDKLFIQLV |
| sequence | | QTYNQLFEENPINASGVDAKAILSARLSKSRRLENLIAQLPGEKKNG |
| | | LFGNLIALSLGLTPNFKSNFDLAEDAKLQLSKDTYDDDLDNLLAQIG |
| | | DQYADLFLAAKNLSDAILLSDILRVNTEITKAPLSASMIKRYDEHHQD |
| | | LTLLKALVRQQLPEKYKEIFFDQSKNGYAGYIDGGASQEEFYKFIKPI |
| | | LEKMDGTEELLVKLNREDLLRKQRTFDNGSIPHQIHLGELHAILRRQ |
| | | EDFYPFLKDNREKIEKILTFRIPYYVGPLARGNSRFAWMTRKSEETIT |
| | | PWNFEEWDKGASAQSFIERMTNFDKNLPNEKVLPKHSLLYEYFTV |
| | | YNELTKVKYVTEGMRKPAFLSGEQKKAIVDLLFKTNRKVTVKQLKE |
| | | DYFKKIECFDSVEISGVEDRFNASLGTYHDLLKIIKDKDFLDNEENED |
| | | ILEDIVLTLTLFEDREMIEERLKTYAHLFDDKVMKQLKRRRYTGWGR |
| | | LSRKLINGIRDKQSGKTILDFLKSDGFANRNFMQLIHDDSLTFKEDIQ |
| | | KAQVSGQGDSLHEHIANLAGSPAIKKGILQTVKVVDELVKVMGRHK |
| | | PENIVIEMARENQTTQKGQKNSRERMKRIEEGIKELGSQILKEHPVE |
| | | NTQLQNEKLYLYYLQNGRDMYVDQELDINRLSDYDVDAIVPQSFLK |
| | | DDSIDNKVLTRSDKNRGKSDNVPSEEVVKKMKNYWRQLLNAKLITQ |
| | | RKFDNLTKAERGGLSELDKAGFIKRQLVETRQITKHVAQILDSRMNT |
| | | KYDENDKLIREVKVITLKSKLVSDFRKDFQFYKVREINNYHHAHDAY |
| | | LNAVVGTALIKKYPKLESEFVYGDYKVYDVRKMIAKSEQEIGKATAK |
| | | YFFYSNIMNFFKTEITLANGEIRKRPLIETNGETGEIVWDKGRDFATV |
| | | RKVLSMPQVNIVKKTEVQTGGFSKESILPKRNSDKLIARKKDWDPK |
| | | KYGGFDSPTVAYSVLVVAKVEKGKSKKLKSVKELLGITIMERSSFEK |
| | | NPIDFLEAKGYKEVKKDLIIKLPKYSLFELENGRKRMLASAGELQKG |
| | | NELALPSKYVNFLYLASHYEKLKGSPEDNEQKQLFVEQHKHYLDEII |
| | | EQISEFSKRVILADANLDKVLSAYNKHRDKPIREQAENIIHLFTLTNLG |
| | | APAAFKYFDTTIDRKRYTSTKEVLDATLIHQSITGLYETRIDLSQLGG |
| | | D |
| tr\|F0NN87\|F0NN87_ | 239 | MEVPLYNIFGDNYIIQVATEAENSTIYNNKVEIDDEELRNVLNLAYKIA |
| SULIHCRISPR- | | KNNEDAAAERRGKAKKKKGEEGETTTSNIILPLSGNDKNPWTETLK |
| associatedCasx | | CYNFPTTVALSEVFKNFSQVKECEEVSAPSFVKPEFYEFGRSPGM |
| protein OS = | | VERTRRVKLEVEPHYLIIAAAGWVLTRLGKAKVSEGDYVGVNVFTP |
| Sulfolobus | | TRGILYSLIQNVNGIVPGIKPETAFGLWIARKWSSVTNPNVSWRIY |
| islandicus (strain | | TISDAVGQNPTTINGGFSIDLTKLLEKRYLLSERLEAIARNALSISSNM |
| HVE10/4) GN = | | RERYIVLANYIYEYLTG SKRLEDLLYFANRDLIMNLNSDDGKVRDLK |
| SiH_0402 PE = 4 | | LISAYVNGELIRGEG |
| SV = 1); CasX | | |
| polypeptide | | |
| sequence | | |
| tr\|F0NH53\|F0NH53_ | 240 | MEVPLYNIFGDNYIIQVATEAENSTIYNNKVEIDDEELRNVLNLAYKIA |
| SULIR CRISPR | | KNNEDAAAERRGKAKKKKGEEGETTTSNIILPLSGNDKNPWTETLK |
| associated protein, | | CYNFPTTVALSEVFKNFSQVKECEEVSAPSFVKPEFYKFGRSPGM |
| Casx OS = | | VERTRRVKLEVEPHYLIMAAAGWVLTRLGKAKVSEGDYVGVNVFT |
| Sulfolobus | | PTRGILYSLIQNVNGIVPGIKPETAFGLWIARKVVSSVTNPNVSVVSI |
| islandicus (strain | | YTISDAVGQNPTTINGGFSIDLTKLLEKRDLLSERLEAIARNALSISSN |
| REY15A) | | MRERYIVLANYIYEYLTGSKRLEDLLYFANRDLIMNLNSDDGKVRDL |
| GN = SiRe_0771 | | KLISAYVNGELIRGEG |
| PE = 4 SV = 1); | | |
| CasX polypeptide | | |
| sequence | | |
| CasX polypeptide | 241 | MEKRINKIRKKLSADNATKPVSRSGPMKTLLVRVMTDDLKKRLEKR |
| sequence | | RKKPEVMPQVISNNAANNLRMLLDDYTKMKEAILQVYWQEFKDDH |
| | | VGLMCKFAQPASKKIDQNKLKPEMDEKGNLTTAGFACSQCGQPLF |
| | | VYKLEQVSEKGKAYTNYFGRCNVAEHEKLILLAQLKPVKDSDEAVT |
| | | YSLGKFGQRALDFYSIHVTKESTHPVKPLAQIAGNRYASGPVGKAL |
| | | SDACMGTIASFLSKYQDIIIEHQKWKGNQKRLESLRELAGKENLEY |
| | | PSVTLPPQPHTKEGVDFAYNEVIARVRMWVNLNLWQKLKLSRDDA |
| | | KPLLRLKGFPSFPVVERRENEVDWWNTINEVKKLIDAKRDMGRVF |
| | | WSGVTAEKRNTILEGYNYLPNENDHKKREGSLENPKKPAKRQFGD |
| | | LLLYLEKKYAGDWGKVFDEAWERIDKKIAGLTSHIEREEARNAEDA |
| | | QSKAVLTDWLRAKASFVLERLKEMDEKEFYACEIQLQKWYGDLRG |
| | | NPFAVEAENRVVDISGFSIGSDGHSIQYRNLLAWKYLENGKREFYLL |
| | | MNYGKKGRIRFTDGTDIKKSGKWQGLLYGGGKAKVIDLTFDPDDE |
| | | QLIILPLAFGTRQGREFIWNDLLSLETGLIKLANGRVIEKTIYNKKIGR |
| | | DEPALFVALTFERREVVDPSNIKPVNLIGVARGENIPAVIALTDPEGC |
| | | PLPEFKDSSGGPTDILRIGEGYKEKQRAIQAAKEVEQRRAGGYSRK |
| | | FASKSRNLADDMVRNSARDLFYHAVTHDAVLVFANLSRGFGRQGK |
| | | RTFMTERQYTKMEDWLTAKLAYEGLTSKTYLSKTLAQYTSKTCSNC |
| | | GFTITYADMDVMLVRLKKTSDGWATTLNNKELKAEYQITYYNRYKR |
| | | QTVEKELSAELDRLSEESGNNDISKWTKGRRDEALFLLKKRFSHRP |
| | | VQEQFVCLDCGHEVHAAEQAALNIARSWLFLNSNSTEFKSYKSGK |
| | | QPFVGAWQAFYKRRLKEVWKPNA |
| APG80656.1 | 242 | MSKRHPRISGVKGYRLHAQRLEYTGKSGAMRTIKYPLYSSPSGGR |
| CRISPR- | | TVPREIVSAINDDYVGLYGLSNFDDLYNAEKRNEEKVYSVLDFWYD |
| associated protein | | CVQYGAVFSYTAPGLLKNVAEVRGGSYELTKTLKGSHLYDELQIDK |
| CasY [uncultured | | VIKFLNKKEISRANGSLDKLKKDIIDCFKAEYRERHKDQCNKLADDIK |
| Parcubacteria | | NAKKDAGASLGERQKKLFRDFFGISEQSENDKPSFTNPLNLTCCLL |
| group bacterium]; | | PFDTVNNNRNRGEVLFNKLKEYAQKLDKNEGSLEMWEYIGIGNSG |
| CasY polypeptide | | TAFSNFLGEGFLGRLRENKITELKKAMMDITDAWRGQEQEEELEKR |
| sequence | | LRILAALTIKLREPKFDNHWGGYRSDINGKLSSWLQNYINQTVKIKE |
| | | DLKGHKKDLKKAKEMINRFGESDTKEEAVVSSLLESIEKIVPDDSAD |
| | | DEKPDIPAIAIYRRFLSDGRLTLNRFVQREDVQEALIKERLEAEKKKK |
| | | PKKRKKKSDAEDEKETIDFKELFPHLAKPLKLVPNFYGDSKRELYKK |
| | | YKNAAIYTDALWKAVEKIYKSAFSSSLKNSFFDTDFDKDFFIKRLQKI |
| | | FSVYRRFNTDKWKPIVKNSFAPYCDIVSLAENEVLYKPKQSRSRKS |
| | | AAIDKNRVRLPSTENIAKAGIALARELSVAGFDWKDLLKKEEHEEYID |
| | | LIELHKTALALLLAVTETQLDISALDFVENGTVKDFMKTRDGNLVLEG |
| | | RFLEMFSQSIVFSELRGLAGLMSRKEFITRSAIQTMNGKQAELLYIP |
| | | HEFQSAKITTPKEMSRAFLDLAPAEFATSLEPESLSEKSLLKLKQMR |
| | | YYPHYFGYELTRTGQGIDGGVAENALRLEKSPVKKREIKCKQYKTL |
| | | GRGQNKIVLYVRSSYYQTQFLEWFLHRPKNVQTDVAVSGSFLIDEK |
| | | KVKTRWNYDALTVALEPVSGSERVFVSQPFTIFPEKSAEEEGQRYL |
| | | GIDIGEYGIAYTALEITGDSAKILDQNFISDPQLKTLREEVKGLKLDQR |
| | | RGTFAMPSTKIARIRESLVHSLRNRIHHLALKHKAKIVYELEVSRFEE |
| | | GKQKIKKVYATLKKADVYSEIDADKNLQTTVWGKLAVASEISASYTS |
| | | QFCGACKKLWRAEMQVDETITTQELIGTVRVIKGGTLIDAIKDFMRP |
| | | PIFDENDTPFPKYRDFCDKHHISKKMRGNSCLFICPFCRANADADIQ |
| | | ASQTIALLRYVKEEKKVEDYFERFRKLKNIKVLGQMKKI |
| wild type Cpf1 | 246 | MSIYQEFVNKYSLSKTLRFELIPQGKTLENIKARGLILDDEKRAKDYK |
| polypeptide | | KAKQIIDKYHQFFIEEILSSVCISEDLLQNYSDVYFKLKKSDDDNLQK |
| sequence | | DFKSAKDTIKKQISEYIKDSEKFKNLFNQNLIDAKKGQESDLILWLKQ |
| | | SKDNGIELFKANSDITDIDEALEIIKSFKGWTTYFKGFHENRKNVYSS |
| | | NDIPTSHYRIVDDNLPKFLENKAKYESLKDKAPEAINYEQIKKDLAEE |
| | | LTFDIDYKTSEVNQRVFSLDEVFEIANFNNYLNQSGITKFNTIIGGKF |
| | | VNGENTKRKGINEYINLYSQQINDKTLKKYKMSVLFKQILSDTESKS |
| | | FVIDKLEDDSDVVTTMQSFYEQIAAFKTVEEKSIKETLSLLFDDLKAQ |
| | | KLDLSKIYFKNDKSLTDLSQQVFDDYSVIGTAVLEYITQQIAPKNLDN |
| | | PSKKEQELIAKKTEKAKYLSLETIKLALEEFNKHRDIDKQCRFEEILA |
| | | NFAAIPMIFDEIAQNKDNLAQISIKYQNQGKKDLLQASAEDDVKAIKD |
| | | LLDQTNNLLHKLKIFHISQSEDKANILDKDEHFYLVFEECYFELANIVP |
| | | LYNKIRNYITQKPYSDEKFKLNFENSTLANGWDKNKEPDNTAILFIKD |
| | | DKYYLGVMNKKNNKIFDDKAIKENKGEGYKKIVYKLLPGANKMLPK |
| | | VFFSAKSIKFYNPSEDILRIRNHSTHTKNGSPQKGYEKFEFNIEDCR |
| | | KFIDFYKQSISKHPEWKDFGFRFSDTQRYNSIDEFYREVENQGYKL |
| | | TFENISESYIDSVVNQGKLYLFQIYNKDFSAYSKGRPNLHTLYWKAL |
| | | FDERNLQDVVYKLNGEAELFYRKQSIPKKITHPAKEAIANKNKDNPK |
| | | KESVFEYDLIKDKRFTEDKFFFHCPITINFKSSGANKFNDEINLLLKE |
| | | KANDVHILSIDRGERHLAYYTLVDGKGNIIKQDTFNIIGNDRMKTNYH |
| | | DKLAAIEKDRDSARKDWKKINNIKEMKEGYLSQVVHEIAKLVIEYNAI |
| | | VVFEDLNFGFKRGRFKVEKQVYQKLEKMLIEKLNYLVFKDNEFDKT |
| | | GGVLRAYQLTAPFETFKKMGKQTGIIYYVPAGFTSKICPVTGFVNQL |
| | | YPKYESVSKSQEFFSKFDKICYNLDKGYFEFSFDYKNFGDKAAKGK |
| | | WTIASFGSRLINFRNSDKNHNWDTREVYPTKELEKLLKDYSIEYGH |
| | | GECIKAAICGESDKKFFAKLTSVLNTILQMRNSKTGTELDYLISPVAD |
| | | VNGNFFDSRQAPKNMPQDADANGAYHIGLKGLMLLGRIKNNQEGK |
| | | KLNLVIKNEEYFEFVQNRNN |
| Cpf1 D917A | 247 | MSIYQEFVNKYSLSKTLRFELIPQGKTLENIKARGLILDDEKRAKDYK |
| polypeptide | | KAKQIIDKYHQFFIEEILSSVCISEDLLQNYSDVYFKLKKSDDDNLQK |
| sequence | | DFKSAKDTIKKQISEYIKDSEKFKNLFNQNLIDAKKGQESDLILWLKQ |
| | | SKDNGIELFKANSDITDIDEALEIIKSFKGWTTYFKGFHENRKNVYSS |
| | | NDIPTSHYRIVDDNLPKFLENKAKYESLKDKAPEAINYEQIKKDLAEE |
| | | LTFDIDYKTSEVNQRVFSLDEVFEIANFNNYLNQSGITKFNTIIGGKF |
| | | VNGENTKRKGINEYINLYSQQINDKTLKKYKMSVLFKQILSDTESKS |
| | | FVIDKLEDDSDVVTTMQSFYEQIAAFKTVEEKSIKETLSLLFDDLKAQ |
| | | KLDLSKIYFKNDKSLTDLSQQVFDDYSVIGTAVLEYITQQIAPKNLDN |
| | | PSKKEQELIAKKTEKAKYLSLETIKLALEEFNKHRDIDKQCRFEEILA |
| | | NFAAIPMIFDEIAQNKDNLAQISIKYQNQGKKDLLQASAEDDVKAIKD |
| | | LLDQTNNLLHKLKIFHISQSEDKANILDKDEHFYLVFEECYFELANIVP |
| | | LYNKIRNYITQKPYSDEKFKLNFENSTLANGWDKNKEPDNTAILFIKD |
| | | DKYYLGVMNKKNNKIFDDKAIKENKGEGYKKIVYKLLPGANKMLPK |
| | | VFFSAKSIKFYNPSEDILRIRNHSTHTKNGSPQKGYEKFEFNIEDCR |
| | | KFIDFYKQSISKHPEWKDFGFRFSDTQRYNSIDEFYREVENQGYKL |
| | | TFENISESYIDSVVNQGKLYLFQIYNKDFSAYSKGRPNLHTLYWKAL |
| | | FDERNLQDVVYKLNGEAELFYRKQSIPKKITHPAKEAIANKNKDNPK |
| | | KESVFEYDLIKDKRFTEDKFFFHCPITINFKSSGANKFNDEINLLLKE |
| | | KANDVHILSIARGERHLAYYTLVDGKGNIIKQDTFNIIGNDRMKTNYH |
| | | DKLAAIEKDRDSARKDWKKINNIKEMKEGYLSQVVHEIAKLVIEYNAI |
| | | VVFEDLNFGFKRGRFKVEKQVYQKLEKMLIEKLNYLVFKDNEFDKT |
| | | GGVLRAYQLTAPFETFKKMGKQTGIIYYVPAGFTSKICPVTGFVNQL |
| | | YPKYESVSKSQEFFSKFDKICYNLDKGYFEFSFDYKNFGDKAAKGK |
| | | WTIASFGSRLINFRNSDKNHNWDTREVYPTKELEKLLKDYSIEYGH |
| | | GECIKAAICGESDKKFFAKLTSVLNTILQMRNSKTGTELDYLISPVAD |
| | | VNGNFFDSRQAPKNMPQDADANGAYHIGLKGLMLLGRIKNNQEGK |
| | | KLNLVIKNEEYFEFVQNRNN |
| Cpf1 E1006A | 248 | MSIYQEFVNKYSLSKTLRFELIPQGKTLENIKARGLILDDEKRAKDYK |
| polypeptide | | KAKQIIDKYHQFFIEEILSSVCISEDLLQNYSDVYFKLKKSDDDNLQK |
| sequence | | DFKSAKDTIKKQISEYIKDSEKFKNLFNQNLIDAKKGQESDLILWLKQ |
| | | SKDNGIELFKANSDITDIDEALEIIKSFKGWTTYFKGFHENRKNVYSS |
| | | NDIPTSHYRIVDDNLPKFLENKAKYESLKDKAPEAINYEQIKKDLAEE |
| | | LTFDIDYKTSEVNQRVFSLDEVFEIANFNNYLNQSGITKFNTIIGGKF |
| | | VNGENTKRKGINEYINLYSQQINDKTLKKYKMSVLFKQILSDTESKS |
| | | FVIDKLEDDSDVVTTMQSFYEQIAAFKTVEEKSIKETLSLLFDDLKAQ |
| | | KLDLSKIYFKNDKSLTDLSQQVFDDYSVIGTAVLEYITQQIAPKNLDN |
| | | PSKKEQELIAKKTEKAKYLSLETIKLALEEFNKHRDIDKQCRFEEILA |
| | | NFAAIPMIFDEIAQNKDNLAQISIKYQNQGKKDLLQASAEDDVKAIKD |
| | | LLDQTNNLLHKLKIFHISQSEDKANILDKDEHFYLVFEECYFELANIVP |
| | | LYNKIRNYITQKPYSDEKFKLNFENSTLANGWDKNKEPDNTAILFIKD |
| | | DKYYLGVMNKKNNKIFDDKAIKENKGEGYKKIVYKLLPGANKMLPK |
| | | VFFSAKSIKFYNPSEDILRIRNHSTHTKNGSPQKGYEKFEFNIEDCR |
| | | KFIDFYKQSISKHPEWKDFGFRFSDTQRYNSIDEFYREVENQGYKL |
| | | TFENISESYIDSVVNQGKLYLFQIYNKDFSAYSKGRPNLHTLYWKAL |
| | | FDERNLQDVVYKLNGEAELFYRKQSIPKKITHPAKEAIANKNKDNPK |
| | | KESVFEYDLIKDKRFTEDKFFFHCPITINFKSSGANKFNDEINLLLKE |
| | | KANDVHILSIDRGERHLAYYTLVDGKGNIIKQDTFNIIGNDRMKTNYH |
| | | DKLAAIEKDRDSARKDWKKINNIKEMKEGYLSQVVHEIAKLVIEYNAI |
| | | VVFADLNFGFKRGRFKVEKQVYQKLEKMLIEKLNYLVFKDNEFDKT |
| | | GGVLRAYQLTAPFETFKKMGKQTGIIYYVPAGFTSKICPVTGFVNQL |
| | | YPKYESVSKSQEFFSKFDKICYNLDKGYFEFSFDYKNFGDKAAKGK |
| | | WTIASFGSRLINFRNSDKNHNWDTREVYPTKELEKLLKDYSIEYGH |
| | | GECIKAAICGESDKKFFAKLTSVLNTILQMRNSKTGTELDYLISPVAD |
| | | VNGNFFDSRQAPKNMPQDADANGAYHIGLKGLMLLGRIKNNQEGK |
| | | KLNLVIKNEEYFEFVQNRNN |
| Cpf1 D1255A | 249 | MSIYQEFVNKYSLSKTLRFELIPQGKTLENIKARGLILDDEKRAKDYK |
| polypeptide | | KAKQIIDKYHQFFIEEILSSVCISEDLLQNYSDVYFKLKKSDDDNLQK |
| sequence | | DFKSAKDTIKKQISEYIKDSEKFKNLFNQNLIDAKKGQESDLILWLKQ |
| | | SKDNGIELFKANSDITDIDEALEIIKSFKGWTTYFKGFHENRKNVYSS |
| | | NDIPTSHYRIVDDNLPKFLENKAKYESLKDKAPEAINYEQIKKDLAEE |
| | | LTFDIDYKTSEVNQRVFSLDEVFEIANFNNYLNQSGITKFNTIIGGKF |
| | | VNGENTKRKGINEYINLYSQQINDKTLKKYKMSVLFKQILSDTESKS |
| | | FVIDKLEDDSDVVTTMQSFYEQIAAFKTVEEKSIKETLSLLFDDLKAQ |
| | | KLDLSKIYFKNDKSLTDLSQQVFDDYSVIGTAVLEYITQQIAPKNLDN |
| | | PSKKEQELIAKKTEKAKYLSLETIKLALEEFNKHRDIDKQCRFEEILA |
| | | NFAAIPMIFDEIAQNKDNLAQISIKYQNQGKKDLLQASAEDDVKAIKD |
| | | LLDQTNNLLHKLKIFHISQSEDKANILDKDEHFYLVFEECYFELANIVP |
| | | LYNKIRNYITQKPYSDEKFKLNFENSTLANGWDKNKEPDNTAILFIKD |
| | | DKYYLGVMNKKNNKIFDDKAIKENKGEGYKKIVYKLLPGANKMLPK |
| | | VFFSAKSIKFYNPSEDILRIRNHSTHTKNGSPQKGYEKFEFNIEDCR |
| | | KFIDFYKQSISKHPEWKDFGFRFSDTQRYNSIDEFYREVENQGYKL |
| | | TFENISESYIDSVVNQGKLYLFQIYNKDFSAYSKGRPNLHTLYWKAL |
| | | FDERNLQDVVYKLNGEAELFYRKQSIPKKITHPAKEAIANKNKDNPK |
| | | KESVFEYDLIKDKRFTEDKFFFHCPITINFKSSGANKFNDEINLLLKE |
| | | KANDVHILSIDRGERHLAYYTLVDGKGNIIKQDTFNIIGNDRMKTNYH |
| | | DKLAAIEKDRDSARKDWKKINNIKEMKEGYLSQVVHEIAKLVIEYNAI |
| | | VVFEDLNFGFKRGRFKVEKQVYQKLEKMLIEKLNYLVFKDNEFDKT |
| | | GGVLRAYQLTAPFETFKKMGKQTGIIYYVPAGFTSKICPVTGFVNQL |
| | | YPKYESVSKSQEFFSKFDKICYNLDKGYFEFSFDYKNFGDKAAKGK |
| | | WTIASFGSRLINFRNSDKNHNWDTREVYPTKELEKLLKDYSIEYGH |
| | | GECIKAAICGESDKKFFAKLTSVLNTILQMRNSKTGTELDYLISPVAD |
| | | VNGNFFDSRQAPKNMPQDAAANGAYHIGLKGLMLLGRIKNNQEGK |
| | | KLNLVIKNEEYFEFVQNRNN |
| Cpf1 | 250 | MSIYQEFVNKYSLSKTLRFELIPQGKTLENIKARGLILDDEKRAKDYK |
| D917A/E1006A | | KAKQIIDKYHQFFIEEILSSVCISEDLLQNYSDVYFKLKKSDDDNLQK |
| polypeptide | | DFKSAKDTIKKQISEYIKDSEKFKNLFNQNLIDAKKGQESDLILWLKQ |
| sequence | | SKDNGIELFKANSDITDIDEALEIIKSFKGWTTYFKGFHENRKNVYSS |
| | | NDIPTSHYRIVDDNLPKFLENKAKYESLKDKAPEAINYEQIKKDLAEE |
| | | LTFDIDYKTSEVNQRVFSLDEVFEIANFNNYLNQSGITKFNTIIGGKF |
| | | VNGENTKRKGINEYINLYSQQINDKTLKKYKMSVLFKQILSDTESKS |
| | | FVIDKLEDDSDVVTTMQSFYEQIAAFKTVEEKSIKETLSLLFDDLKAQ |
| | | KLDLSKIYFKNDKSLTDLSQQVFDDYSVIGTAVLEYITQQIAPKNLDN |
| | | PSKKEQELIAKKTEKAKYLSLETIKLALEEFNKHRDIDKQCRFEEILA |
| | | NFAAIPMIFDEIAQNKDNLAQISIKYQNQGKKDLLQASAEDDVKAIKD |
| | | LLDQTNNLLHKLKIFHISQSEDKANILDKDEHFYLVFEECYFELANIVP |
| | | LYNKIRNYITQKPYSDEKFKLNFENSTLANGWDKNKEPDNTAILFIKD |
| | | DKYYLGVMNKKNNKIFDDKAIKENKGEGYKKIVYKLLPGANKMLPK |
| | | VFFSAKSIKFYNPSEDILRIRNHSTHTKNGSPQKGYEKFEFNIEDCR |
| | | KFIDFYKQSISKHPEWKDFGFRFSDTQRYNSIDEFYREVENQGYKL |
| | | TFENISESYIDSVVNQGKLYLFQIYNKDFSAYSKGRPNLHTLYWKAL |
| | | FDERNLQDVVYKLNGEAELFYRKQSIPKKITHPAKEAIANKNKDNPK |
| | | KESVFEYDLIKDKRFTEDKFFFHCPITINFKSSGANKFNDEINLLLKE |
| | | KANDVHILSIARGERHLAYYTLVDGKGNIIKQDTFNIIGNDRMKTNYH |
| | | DKLAAIEKDRDSARKDWKKINNIKEMKEGYLSQVVHEIAKLVIEYNAI |
| | | VVFADLNFGFKRGRFKVEKQVYQKLEKMLIEKLNYLVFKDNEFDKT |
| | | GGVLRAYQLTAPFETFKKMGKQTGIIYYVPAGFTSKICPVTGFVNQL |
| | | YPKYESVSKSQEFFSKFDKICYNLDKGYFEFSFDYKNFGDKAAKGK |
| | | WTIASFGSRLINFRNSDKNHNWDTREVYPTKELEKLLKDYSIEYGH |
| | | GECIKAAICGESDKKFFAKLTSVLNTILQMRNSKTGTELDYLISPVAD |
| | | VNGNFFDSRQAPKNMPQDADANGAYHIGLKGLMLLGRIKNNQEGK |
| | | KLNLVIKNEEYFEFVQNRNN |
| Cpf1 | 251 | MSIYQEFVNKYSLSKTLRFELIPQGKTLENIKARGLILDDEKRAKDYK |
| D917A/D1255A | | KAKQIIDKYHQFFIEEILSSVCISEDLLQNYSDVYFKLKKSDDDNLQK |
| polypeptide | | DFKSAKDTIKKQISEYIKDSEKFKNLFNQNLIDAKKGQESDLILWLKQ |
| sequence | | SKDNGIELFKANSDITDIDEALEIIKSFKGWTTYFKGFHENRKNVYSS |
| | | NDIPTSHYRIVDDNLPKFLENKAKYESLKDKAPEAINYEQIKKDLAEE |
| | | LTFDIDYKTSEVNQRVFSLDEVFEIANFNNYLNQSGITKFNTIIGGKF |
| | | VNGENTKRKGINEYINLYSQQINDKTLKKYKMSVLFKQILSDTESKS |
| | | FVIDKLEDDSDVVTTMQSFYEQIAAFKTVEEKSIKETLSLLFDDLKAQ |
| | | KLDLSKIYFKNDKSLTDLSQQVFDDYSVIGTAVLEYITQQIAPKNLDN |
| | | PSKKEQELIAKKTEKAKYLSLETIKLALEEFNKHRDIDKQCRFEEILA |
| | | NFAAIPMIFDEIAQNKDNLAQISIKYQNQGKKDLLQASAEDDVKAIKD |
| | | LLDQTNNLLHKLKIFHISQSEDKANILDKDEHFYLVFEECYFELANIVP |
| | | LYNKIRNYITQKPYSDEKFKLNFENSTLANGWDKNKEPDNTAILFIKD |
| | | DKYYLGVMNKKNNKIFDDKAIKENKGEGYKKIVYKLLPGANKMLPK |
| | | VFFSAKSIKFYNPSEDILRIRNHSTHTKNGSPQKGYEKFEFNIEDCR |
| | | KFIDFYKQSISKHPEWKDFGFRFSDTQRYNSIDEFYREVENQGYKL |
| | | TFENISESYIDSVVNQGKLYLFQIYNKDFSAYSKGRPNLHTLYWKAL |
| | | FDERNLQDVVYKLNGEAELFYRKQSIPKKITHPAKEAIANKNKDNPK |
| | | KESVFEYDLIKDKRFTEDKFFFHCPITINFKSSGANKFNDEINLLLKE |
| | | KANDVHILSIARGERHLAYYTLVDGKGNIIKQDTFNIIGNDRMKTNYH |
| | | DKLAAIEKDRDSARKDWKKINNIKEMKEGYLSQVVHEIAKLVIEYNAI |
| | | VVFEDLNFGFKRGRFKVEKQVYQKLEKMLIEKLNYLVFKDNEFDKT |
| | | GGVLRAYQLTAPFETFKKMGKQTGIIYYVPAGFTSKICPVTGFVNQL |
| | | YPKYESVSKSQEFFSKFDKICYNLDKGYFEFSFDYKNFGDKAAKGK |
| | | WTIASFGSRLINFRNSDKNHNWDTREVYPTKELEKLLKDYSIEYGH |
| | | GECIKAAICGESDKKFFAKLTSVLNTILQMRNSKTGTELDYLISPVAD |
| | | VNGNFFDSRQAPKNMPQDAAANGAYHIGLKGLMLLGRIKNNQEGK |
| | | KLNLVIKNEEYFEFVQNRNN |
| Cpf1 | 252 | MSIYQEFVNKYSLSKTLRFELIPQGKTLENIKARGLILDDEKRAKDYK |
| E1006A/D1255A | | KAKQIIDKYHQFFIEEILSSVCISEDLLQNYSDVYFKLKKSDDDNLQK |
| polypeptide | | DFKSAKDTIKKQISEYIKDSEKFKNLFNQNLIDAKKGQESDLILWLKQ |
| sequence | | SKDNGIELFKANSDITDIDEALEIIKSFKGWTTYFKGFHENRKNVYSS |
| | | NDIPTSHYRIVDDNLPKFLENKAKYESLKDKAPEAINYEQIKKDLAEE |
| | | LTFDIDYKTSEVNQRVFSLDEVFEIANFNNYLNQSGITKFNTIIGGKF |
| | | VNGENTKRKGINEYINLYSQQINDKTLKKYKMSVLFKQILSDTESKS |
| | | FVIDKLEDDSDVVTTMQSFYEQIAAFKTVEEKSIKETLSLLFDDLKAQ |
| | | KLDLSKIYFKNDKSLTDLSQQVFDDYSVIGTAVLEYITQQIAPKNLDN |
| | | PSKKEQELIAKKTEKAKYLSLETIKLALEEFNKHRDIDKQCRFEEILA |
| | | NFAAIPMIFDEIAQNKDNLAQISIKYQNQGKKDLLQASAEDDVKAIKD |
| | | LLDQTNNLLHKLKIFHISQSEDKANILDKDEHFYLVFEECYFELANIVP |
| | | LYNKIRNYITQKPYSDEKFKLNFENSTLANGWDKNKEPDNTAILFIKD |
| | | DKYYLGVMNKKNNKIFDDKAIKENKGEGYKKIVYKLLPGANKMLPK |
| | | VFFSAKSIKFYNPSEDILRIRNHSTHTKNGSPQKGYEKFEFNIEDCR |
| | | KFIDFYKQSISKHPEWKDFGFRFSDTQRYNSIDEFYREVENQGYKL |
| | | TFENISESYIDSVVNQGKLYLFQIYNKDFSAYSKGRPNLHTLYWKAL |
| | | FDERNLQDVVYKLNGEAELFYRKQSIPKKITHPAKEAIANKNKDNPK |
| | | KESVFEYDLIKDKRFTEDKFFFHCPITINFKSSGANKFNDEINLLLKE |
| | | KANDVHILSIDRGERHLAYYTLVDGKGNIIKQDTFNIIGNDRMKTNYH |
| | | DKLAAIEKDRDSARKDWKKINNIKEMKEGYLSQVVHEIAKLVIEYNAI |
| | | VVFADLNFGFKRGRFKVEKQVYQKLEKMLIEKLNYLVFKDNEFDKT |
| | | GGVLRAYQLTAPFETFKKMGKQTGIIYYVPAGFTSKICPVTGFVNQL |
| | | YPKYESVSKSQEFFSKFDKICYNLDKGYFEFSFDYKNFGDKAAKGK |
| | | WTIASFGSRLINFRNSDKNHNWDTREVYPTKELEKLLKDYSIEYGH |
| | | GECIKAAICGESDKKFFAKLTSVLNTILQMRNSKTGTELDYLISPVAD |
| | | VNGNFFDSRQAPKNMPQDAAANGAYHIGLKGLMLLGRIKNNQEGK |
| | | KLNLVIKNEEYFEFVQNRNN |
| Cpf1 | 253 | MSIYQEFVNKYSLSKTLRFELIPQGKTLENIKARGLILDDEKRAKDYK |
| D917A/E1006A/ | | KAKQIIDKYHQFFIEEILSSVCISEDLLQNYSDVYFKLKKSDDDNLQK |
| D1255A polypeptide | | DFKSAKDTIKKQISEYIKDSEKFKNLFNQNLIDAKKGQESDLILWLKQ |
| sequence | | SKDNGIELFKANSDITDIDEALEIIKSFKGWTTYFKGFHENRKNVYSS |
| | | NDIPTSHYRIVDDNLPKFLENKAKYESLKDKAPEAINYEQIKKDLAEE |
| | | LTFDIDYKTSEVNQRVFSLDEVFEIANFNNYLNQSGITKFNTIIGGKF |
| | | VNGENTKRKGINEYINLYSQQINDKTLKKYKMSVLFKQILSDTESKS |
| | | FVIDKLEDDSDVVTTMQSFYEQIAAFKTVEEKSIKETLSLLFDDLKAQ |
| | | KLDLSKIYFKNDKSLTDLSQQVFDDYSVIGTAVLEYITQQIAPKNLDN |
| | | PSKKEQELIAKKTEKAKYLSLETIKLALEEFNKHRDIDKQCRFEEILA |
| | | NFAAIPMIFDEIAQNKDNLAQISIKYQNQGKKDLLQASAEDDVKAIKD |
| | | LLDQTNNLLHKLKIFHISQSEDKANILDKDEHFYLVFEECYFELANIVP |
| | | LYNKIRNYITQKPYSDEKFKLNFENSTLANGWDKNKEPDNTAILFIKD |
| | | DKYYLGVMNKKNNKIFDDKAIKENKGEGYKKIVYKLLPGANKMLPK |
| | | VFFSAKSIKFYNPSEDILRIRNHSTHTKNGSPQKGYEKFEFNIEDCR |
| | | KFIDFYKQSISKHPEWKDFGFRFSDTQRYNSIDEFYREVENQGYKL |
| | | TFENISESYIDSVVNQGKLYLFQIYNKDFSAYSKGRPNLHTLYWKAL |
| | | FDERNLQDVVYKLNGEAELFYRKQSIPKKITHPAKEAIANKNKDNPK |
| | | KESVFEYDLIKDKRFTEDKFFFHCPITINFKSSGANKFNDEINLLLKE |
| | | KANDVHILSIARGERHLAYYTLVDGKGNIIKQDTFNIIGNDRMKTNYH |
| | | DKLAAIEKDRDSARKDWKKINNIKEMKEGYLSQVVHEIAKLVIEYNAI |
| | | VVFADLNFGFKRGRFKVEKQVYQKLEKMLIEKLNYLVFKDNEFDKT |
| | | GGVLRAYQLTAPFETFKKMGKQTGIIYYVPAGFTSKICPVTGFVNQL |
| | | YPKYESVSKSQEFFSKFDKICYNLDKGYFEFSFDYKNFGDKAAKGK |
| | | WTIASFGSRLINFRNSDKNHNWDTREVYPTKELEKLLKDYSIEYGH |
| | | GECIKAAICGESDKKFFAKLTSVLNTILQMRNSKTGTELDYLISPVAD |
| | | VNGNFFDSRQAPKNMPQDAAANGAYHIGLKGLMLLGRIKNNQEGK |
| | | KLNLVIKNEEYFEFVQNRNN |
| synthetic | 254 | KRNYILGLDIGITSVGYGIIDYETRDVIDAGVRLFKEANVENNEGRRS |
| polypeptide | | KRGARRLKRRRRHRIQRVKKLLFDYNLLTDHSELSGINPYEARVKG |
| | | LSQKLSEEEFSAALLHLAKRRGVHNVNEVEEDTGNELSTKEQISRN |
| | | SKALEEKYVAELQLERLKKDGEVRGSINRFKTSDYVKEAKQLLKVQ |
| | | KAYHQLDQSFIDTYIDLLETRRTYYEGPGEGSPFGWKDIKEWYEML |
| | | MGHCTYFPEELRSVKYAYNADLYNALNDLNNLVITRDENEKLEYYE |
| | | KFQIIENVFKQKKKPTLKQIAKEILVNEEDIKGYRVTSTGKPEFTNLKV |
| | | YHDIKDITARKEIIENAELLDQIAKILTIYQSSEDIQEELTNLNSELTQE |
| | | EIEQISNLKGYTGTHNLSLKAINLILDELWHTNDNQIAIFNRLKLVPKK |
| | | VDLSQQKEIPTTLVDDFILSPVVKRSFIQSIKVINAIIKKYGLPNDIIIELA |
| | | REKNSKDAQKMINEMQKRNRQTNERIEEIIRTTGKENAKYLIEKIKLH |
| | | DMQEGKCLYSLEAIPLEDLLNNPFNYEVDHIIPRSVSFDNSFNNKVL |
| | | VKQEENSKKGNRTPFQYLSSSDSKISYETFKKHILNLAKGKGRISKT |
| | | KKEYLLEERDINRFSVQKDFINRNLVDTRYATRGLMNLLRSYFRVN |
| | | NLDVKVKSINGGFTSFLRRKWKFKKERNKGYKHHAEDALIIANADFI |
| | | FKEWKKLDKAKKVMENQMFEEKQAESMPEIETEQEYKEIFITPHQIK |
| | | HIKDFKDYKYSHRVDKKPNRELINDTLYSTRKDDKGNTLIVNNLNGL |
| | | YDKDNDKLKKLINKSPEKLLMYHHDPQTYQKLKLIMEQYGDEKNPL |
| | | YKYYEETGNYLTKYSKKDNGPVIKKIKYYGNKLNAHLDITDDYPNSR |
| | | NKVVKLSLKPYRFDVYLDNGVYKFVTVKNLDVIKKENYYEVNSKCY |
| | | EEAKKLKKISNQAEFIASFYNNDLIKINGELYRVIGVNNDLLNRIEVNM |
| | | IDITYREYLENMNDKRPPRIIKTIASKTQSIKKYSTDILGNLYEVKSKK |
| | | HPQIIKKG |
| SaCas9n | 255 | KRNYILGLDIGITSVGYGIIDYETRDVIDAGVRLFKEANVENNEGRRS |
| polypeptide | | KRGARRLKRRRRHRIQRVKKLLFDYNLLTDHSELSGINPYEARVKG |
| sequence | | LSQKLSEEEFSAALLHLAKRRGVHNVNEVEEDTGNELSTKEQISRN |
| | | SKALEEKYVAELQLERLKKDGEVRGSINRFKTSDYVKEAKQLLKVQ |
| | | KAYHQLDQSFIDTYIDLLETRRTYYEGPGEGSPFGWKDIKEWYEML |
| | | MGHCTYFPEELRSVKYAYNADLYNALNDLNNLVITRDENEKLEYYE |
| | | KFQIIENVFKQKKKPTLKQIAKEILVNEEDIKGYRVTSTGKPEFTNLKV |
| | | YHDIKDITARKEIIENAELLDQIAKILTIYQSSEDIQEELTNLNSELTQE |
| | | EIEQISNLKGYTGTHNLSLKAINLILDELWHTNDNQIAIFNRLKLVPKK |
| | | VDLSQQKEIPTTLVDDFILSPVVKRSFIQSIKVINAIIKKYGLPNDIIIELA |
| | | REKNSKDAQKMINEMQKRNRQTNERIEEIIRTTGKENAKYLIEKIKLH |
| | | DMQEGKCLYSLEAIPLEDLLNNPFNYEVDHIIPRSVSFDNSFNNKVL |
| | | VKQEEASKKGNRTPFQYLSSSDSKISYETFKKHILNLAKGKGRISKT |
| | | KKEYLLEERDINRFSVQKDFINRNLVDTRYATRGLMNLLRSYFRVN |
| | | NLDVKVKSINGGFTSFLRRKWKFKKERNKGYKHHAEDALIIANADFI |
| | | FKEWKKLDKAKKVMENQMFEEKQAESMPEIETEQEYKEIFITPHQIK |
| | | HIKDFKDYKYSHRVDKKPNRELINDTLYSTRKDDKGNTLIVNNLNGL |
| | | YDKDNDKLKKLINKSPEKLLMYHHDPQTYQKLKLIMEQYGDEKNPL |
| | | YKYYEETGNYLTKYSKKDNGPVIKKIKYYGNKLNAHLDITDDYPNSR |
| | | NKVVKLSLKPYRFDVYLDNGVYKFVTVKNLDVIKKENYYEVNSKCY |
| | | EEAKKLKKISNQAEFIASFYNNDLIKINGELYRVIGVNNDLLNRIEVNM |
| | | IDITYREYLENMNDKRPPRIIKTIASKTQSIKKYSTDILGNLYEVKSKK |
| | | HPQIIKKG |
| SaKKH Cas9 | 256 | KRNYILGLDIGITSVGYGIIDYETRDVIDAGVRLFKEANVENNEGRRS |
| polypeptide | | KRGARRLKRRRRHRIQRVKKLLFDYNLLTDHSELSGINPYEARVKG |
| sequence | | LSQKLSEEEFSAALLHLAKRRGVHNVNEVEEDTGNELSTKEQISRN |
| | | SKALEEKYVAELQLERLKKDGEVRGSINRFKTSDYVKEAKQLLKVQ |
| | | KAYHQLDQSFIDTYIDLLETRRTYYEGPGEGSPFGWKDIKEWYEML |
| | | MGHCTYFPEELRSVKYAYNADLYNALNDLNNLVITRDENEKLEYYE |
| | | KFQIIENVFKQKKKPTLKQIAKEILVNEEDIKGYRVTSTGKPEFTNLKV |
| | | YHDIKDITARKEIIENAELLDQIAKILTIYQSSEDIQEELTNLNSELTQE |
| | | EIEQISNLKGYTGTHNLSLKAINLILDELWHTNDNQIAIFNRLKLVPKK |
| | | VDLSQQKEIPTTLVDDFILSPVVKRSFIQSIKVINAIIKKYGLPNDIIIELA |
| | | REKNSKDAQKMINEMQKRNRQTNERIEEIIRTTGKENAKYLIEKIKLH |
| | | DMQEGKCLYSLEAIPLEDLLNNPFNYEVDHIIPRSVSFDNSFNNKVL |
| | | VKQEEASKKGNRTPFQYLSSSDSKISYETFKKHILNLAKGKGRISKT |
| | | KKEYLLEERDINRFSVQKDFINRNLVDTRYATRGLMNLLRSYFRVN |
| | | NLDVKVKSINGGFTSFLRRKWKFKKERNKGYKHHAEDALIIANADFI |
| | | FKEWKKLDKAKKVMENQMFEEKQAESMPEIETEQEYKEIFITPHQIK |
| | | HIKDFKDYKYSHRVDKKPNRKLINDTLYSTRKDDKGNTLIVNNLNGL |
| | | YDKDNDKLKKLINKSPEKLLMYHHDPQTYQKLKLIMEQYGDEKNPL |
| | | YKYYEETGNYLTKYSKKDNGPVIKKIKYYGNKLNAHLDITDDYPNSR |
| | | NKVVKLSLKPYRFDVYLDNGVYKFVTVKNLDVIKKENYYEVNSKCY |
| | | EEAKKLKKISNQAEFIASFYKNDLIKINGELYRVIGVNNDLLNRIEVNM |
| | | IDITYREYLENMNDKRPPHIIKTIASKTQSIKKYSTDILGNLYEVKSKK |
| | | HPQIIKKG |
| Casphi-1 | 285 | MADTPTLFTQFLRHHLPGQRFRKDILKQAGRILANKGEDATIAFLRG |
| polypeptide | | KSEESPPDFQPPVKCPIIACSRPLTEWPIYQASVAIQGYVYGQSLAE |
| sequence | | FEASDPGCSKDGLLGWFDKTGVCTDYFSVQGLNLIFQNARKRYIGV |
| | | QTKVTNRNEKRHKKLKRINAKRIAEGLPELTSDEPESALDETGHLID |
| | | PPGLNTNIYCYQQVSPKPLALSEVNQLPTAYAGYSTSGDDPIQPMV |
| | | TKDRLSISKGQPGYIPEHQRALLSQKKHRRMRGYGLKARALLVIVRI |
| | | QDDWAVIDLRSLLRNAYWRRIVQTKEPSTITKLLKLVTGDPVLDATR |
| | | MVATFTYKPGIVQVRSAKCLKNKQGSKLFSERYLNETVSVTSIDLGS |
| | | NNLVAVATYRLVNGNTPELLQRFTLPSHLVKDFERYKQAHDTLEDSI |
| | | QKTAVASLPQGQQTEIRMWSMYGFREAQERVCQELGLADGSIPW |
| | | NVMTATSTILTDLFLARGGDPKKCMFTSEPKKKKNSKQVLYKIRDR |
| | | AWAKMYRTLLSKETREAWNKALWGLKRGSPDYARLSKRKEELAR |
| | | RCVNYTISTAEKRAQCGRTIVALEDLNIGFFHGRGKQEPGWVGLFT |
| | | RKKENRWLMQALHKAFLELAHHRGYHVIEVNPAYTSQTCPVCRHC |
| | | DPDNRDQHNREAFHCIGCGFRGNADLDVATHNIAMVAITGESLKRA |
| | | RGSVASKTPQPLAAE |
| Casphi-2 | 286 | MPKPAVESEFSKVLKKHFPGERFRSSYMKRGGKILAAQGEEAVVA |
| polypeptide | | YLQGKSEEEPPNFQPPAKCHVVTKSRDFAEWPIMKASEAIQRYIYA |
| sequence | | LSTTERAACKPGKSSESHAAWFAATGVSNHGYSHVQGLNLIFDHTL |
| | | GRYDGVLKKVQLRNEKARARLESINASRADEGLPEIKAEEEEVATN |
| | | ETGHLLQPPGINPSFYVYQTISPQAYRPRDEIVLPPEYAGYVRDPNA |
| | | PIPLGVVRNRCDIQKGCPGYIPEWQREAGTAISPKTGKAVTVPGLS |
| | | PKKNKRMRRYWRSEKEKAQDALLVTVRIGTDWWIDVRGLLRNAR |
| | | WRTIAPKDISLNALLDLFTGDPVIDVRRNIVTFTYTLDACGTYARKWT |
| | | LKGKQTKATLDKLTATQTVALVAIDLGQTNPISAGISRVTQENGALQ |
| | | CEPLDRFTLPDDLLKDISAYRIAWDRNEEELRARSVEALPEAQQAE |
| | | VRALDGVSKETARTQLCADFGLDPKRLPWDKMSSNTTFISEALLSN |
| | | SVSRDQVFFTPAPKKGAKKKAPVEVMRKDRTWARAYKPRLSVEAQ |
| | | KLKNEALWALKRTSPEYLKLSRRKEELCRRSINYVIEKTRRRTQCQI |
| | | VIPVIEDLNVRFFHGSGKRLPGWDNFFTAKKENRWFIQGLHKAFSD |
| | | LRTHRSFYVFEVRPERTSITCPKCGHCEVGNRDGEAFQCLSCGKT |
| | | CNADLDVATHNLTQVALTGKTMPKREEPRDAQGTAPARKTKKASK |
| | | SKAPPAEREDQTPAQEPSQTS |
| Casphi-3 | 287 | MEKEITELTKIRREFPNKKFSSTDMKKAGKLLKAEGPDAVRDFLNSC |
| polypeptide | | QEIIGDFKPPVKTNIVSISRPFEEWPVSMVGRAIQEYYFSLTKEELES |
| sequence | | VHPGTSSEDHKSFFNITGLSNYNYTSVQGLNLIFKNAKAIYDGTLVK |
| | | ANNKNKKLEKKFNEINHKRSLEGLPIITPDFEEPFDENGHLNNPPGI |
| | | NRNIYGYQGCAAKVFVPSKHKMVSLPKEYEGYNRDPNLSLAGFRN |
| | | RLEIPEGEPGHVPWFQRMDIPEGQIGHVNKIQRFNFVHGKNSGKVK |
| | | FSDKTGRVKRYHHSKYKDATKPYKFLEESKKVSALDSILAIITIGDDW |
| | | WFDIRGLYRNVFYRELAQKGLTAVQLLDLFTGDPVIDPKKGVVTFS |
| | | YKEGVVPVFSQKIVPRFKSRDTLEKLTSQGPVALLSVDLGQNEPVA |
| | | ARVCSLKNINDKITLDNSCRISFLDDYKKQIKDYRDSLDELEIKIRLEAI |
| | | NSLETNQQVEIRDLDVFSADRAKANTVDMFDIDPNLISWDSMSDAR |
| | | VSTQISDLYLKNGGDESRVYFEINNKRIKRSDYNISQLVRPKLSDST |
| | | RKNLNDSIWKLKRTSEEYLKLSKRKLELSRAVVNYTIRQSKLLSGIN |
| | | DMILEDLDVKKKFNGRGIRDIGWDNFFSSRKENRWFIPAFHKAFSE |
| | | LSSNRGLCVIEVNPAWTSATCPDCGFCSKENRDGINFTCRKCGVS |
| | | YHADIDVATLNIARVAVLGKPMSGPADRERLGDTKKPRVARSRKTM |
| | | KRKDISNSTVEAMVTA |
| Casphi-4 | 288 | MYSLEMADLKSEPSLLAKLLRDRFPGKYWLPKYWKLAEKKRLTGG |
| polypeptide | | EEAACEYMADKQLDSPPPNFRPPARCVILAKSRPFEDWPVHRVAS |
| sequence | | KAQSFVIGLSEQGFAALRAAPPSTADARRDWLRSHGASEDDLMAL |
| | | EAQLLETIMGNAISLHGGVLKKIDNANVKAAKRLSGRNEARLNKGLQ |
| | | ELPPEQEGSAYGADGLLVNPPGLNLNIYCRKSCCPKPVKNTARFVG |
| | | HYPGYLRDSDSILISGTMDRLTIIEGMPGHIPAWQREQGLVKPGGR |
| | | RRRLSGSESNMRQKVDPSTGPRRSTRSGTVNRSNQRTGRNGDPL |
| | | LVEIRMKEDWVLLDARGLLRNLRWRESKRGLSCDHEDLSLSGLLAL |
| | | FSGDPVIDPVRNEVVFLYGEGIIPVRSTKPVGTRQSKKLLERQASM |
| | | GPLTLISCDLGQTNLIAGRASAISLTHGSLGVRSSVRIELDPEIIKSFE |
| | | RLRKDADRLETEILTAAKETLSDEQRGEVNSHEKDSPQTAKASLCR |
| | | ELGLHPPSLPWGQMGPSTTFIADMLISHGRDDDAFLSHGEFPTLEK |
| | | RKKFDKRFCLESRPLLSSETRKALNESLWEVKRTSSEYARLSQRKK |
| | | EMARRA VNFVVEISRRKTGLSNVIVNIEDLNVRIFHGGGKQAPGWD |
| | | GFFRPKSENRWFIQAIHKAFSDLAAHHGIPVIESDPQRTSMTCPEC |
| | | GHCDSKNRNGVRFLCKGCGASMDADFDAACRNLERVALTGKPMP |
| | | KPSTSCERLLSATTGKVCSDHSLSHDAIEKAS |
| Casphi-5 | 289 | MSSLPTPLELLKQKHADLFKGLQFSSKDNKMAGKVLKKDGEEAALA |
| polypeptide | | FLSERGVSRGELPNFRPPAKTLVVAQSRPFEEFPIYRVSEAIQLYVY |
| sequence | | SLSVKELETVPSGSSTKKEHQRFFQDSSVPDFGYTSVQGLNKIFGL |
| | | ARGIYLGVITRGENQLQKAKSKHEALNKKRRASGEAETEFDPTPYE |
| | | YMTPERKLAKPPGVNHSIMCYVDISVDEFDFRNPDGIVLPSEYAGY |
| | | CREINTAIEKGTVDRLGHLKGGPGYIPGHQRKESTTEGPKINFRKG |
| | | RIRRSYTALYAKRDSRRVRQGKLALPSYRHHMMRLNSNAESAILAV |
| | | IFFGKDWVVFDLRGLLRNVRWRNLFVDGSTPSTLLGMFGDPVIDPK |
| | | RGVVAFCYKEQIVPVVSKSITKMVKAPELLNKLYLKSEDPLVLVAIDL |
| | | GQTNPVGVGVYRVMNASLDYEVVTRFALESELLREIESYRQRTNAF |
| | | EAQIRAETFDAMTSEEQEEITRVRAFSASKAKENVCHRFGMPVDAV |
| | | DWATMGSNTIHIAKWVMRHGDPSLVEVLEYRKDNEIKLDKNGVPK |
| | | KVKLTDKRIANLTSIRLRFSQETSKHYNDTMWELRRKHPVYQKLSK |
| | | SKADFSRRVVNSIIRRVNHLVPRARIVFIIEDLKNLGKVFHGSGKREL |
| | | GWDSYFEPKSENRWFIQVLHKAFSETGKHKGYYIIECWPNWTSCT |
| | | CPKCSCCDSENRHGEVFRCLACGYTCNTDFGTAPDNLVKIATTGK |
| | | GLPGPKKRCKGSSKGKNPKIARSSETGVSVTESGAPKVKKSSPTQ |
| | | TSQSSSQSAP |
| Casphi-6 | 290 | MNKIEKEKTPLAKLMNENFAGLRFPFAIIKQAGKKLLKEGELKTIEYM |
| polypeptide | | TGKGSIEPLPNFKPPVKCLIVAKRRDLKYFPICKASCEIQSYVYSLNY |
| sequence | | KDFMDYFSTPMTSQKQHEEFFKKSGLNIEYQNVAGLNLIFNNVKNT |
| | | YNGVILKVKNRNEKLKKKAIKNNYEFEEIKTFNDDGCLINKPGINNVI |
| | | YCFQSISPKILKNITHLPKEYNDYDCSVDRNIIQKYVSRLDIPESQPG |
| | | HVPEWQRKLPEFNNTNNPRRRRKWYSNGRNISKGYSVDQVNQAK |
| | | IEDSLLAQIKIGEDWIILDIRGLLRDLNRRELISYKNKLTIKDVLGFFSD |
| | | YPIIDIKKNLVTFCYKEGVIQVVSQKSIGNKKSKQLLEKLIENKPIALVS |
| | | IDLGQTNPVSVKISKLNKINNKISIESFTYRFLNEEILKEIEKYRKDYDK |
| | | LELKLINEA |
| Casphi-7 | 291 | MSNTAVSTREHMSNKTTPPSPLSLLLRAHFPGLKFESQDYKIAGKK |
| polypeptide | | LRDGGPEAVISYLTGKGQAKLKDVKPPAKAFVIAQSRPFIEWDLVRV |
| sequence | | SRQIQEKIFGIPATKGRPKQDGLSETAFNEAVASLEVDGKSKLNEET |
| | | RAAFYEVLGLDAPSLHAQAQNALIKSAISIREGVLKKVENRNEKNLS |
| | | KTKRRKEAGEEATFVEEKAHDERGYLIHPPGVNQTIPGYQAVVIKS |
| | | CPSDFIGLPSGCLAKESAEALTDYLPHDRMTIPKGQPGYVPEWQHP |
| | | LLNRRKNRRRRDWYSASLNKPKATCSKRSGTPNRKNSRTDQIQSG |
| | | RFKGAIPVLMRFQDEWVIIDIRGLLRNARYRKLLKEKSTIPDLLSLFT |
| | | GDPSIDMRQGVCTFIYKAGQACSAKMVKTKNAPEILSELTKSGPW |
| | | LVSIDLGQTNPIAAKVSRVTQLSDGQLSHETLLRELLSNDSSDGKEI |
| | | ARYRVASDRLRDKLANLAVERLSPEHKSEILRAKNDTPALCKARVC |
| | | AALGLNPEMIAWDKMTPYTEFLATAYLEKGGDRKVATLKPKNRPE |
| | | MLRRDIKFKGTEGVRIEVSPEAAEAYREAQWDLQRTSPEYLRLSTW |
| | | KQELTKRILNQLRHKAAKSSQCEVWMAFEDLNIKMMHGNGKWAD |
| | | GGWDAFFIKKRENRWFMQAFHKSLTELGAHKGVPTIEVTPHRTSIT |
| | | CTKCGHCDKANRDGERFACQKCGFVAHADLEIATDNIERVALTGKP |
| | | MPKPESERSGDAKKSVGARKAAFKPEEDAEAAE |
| Casphi-8 | 292 | MIKPTVSQFLTPGFKLIRNHSRTAGLKLKNEGEEACKKFVRENEIPK |
| polypeptide | | DECPNFQGGPAIANIIAKSREFTEWEIYQSSLAIQEVIFTLPKDKLPE |
| sequence | | PILKEEWRAQWLSEHGLDTVPYKEAAGLNLIIKNAVNTYKGVQVKV |
| | | DNKNKNNLAKINRKNEIAKLNGEQEISFEEIKAFDDKGYLLQKPSPN |
| | | KSIYCYQSVSPKPFITSKYHNVNLPEEYIGYYRKSNEPIVSPYQFDRL |
| | | RIPIGEPGYVPKWQYTFLSKKENKRRKLSKRIKNVSPILGIICIKKDW |
| | | CVFDMRGLLRTNHWKKYHKPTDSINDLFDYFTGDPVIDTKANVVRF |
| | | RYKMENGIVNYKPVREKKGKELLENICDQNGSCKLATVDVGQNNP |
| | | VAIGLFELKKVNGELTKTLISRHPTPIDFCNKITAYRERYDKLESSIKL |
| | | DAIKQLTSEQKIEVDNYNNNFTPQNTKQIVCSKLNINPNDLPWDKMI |
| | | SGTHFISEKAQVSNKSEIYFTSTDKGKTKDVMKSDYKWFQDYKPKL |
| | | SKEVRDALSDIEWRLRRESLEFNKLSKSREQDARQLANWISSMCD |
| | | VIGIENLVKKNNFFGGSGKREPGWDNFYKPKKENRWWINAIHKALT |
| | | ELSQNKGKRVILLPAMRTSITCPKCKYCDSKNRNGEKFNCLKCGIEL |
| | | NADIDVATENLATVAITAQSMPKPTCERSGDAKKPVRARKAKAPEF |
| | | HDKLAPSYTVVLREAV |
| Casphi-9 | 293 | MRSSREIGDKILMRQPAEKTAFQVFRQEVIGTQKLSGGDAKTAGRL |
| polypeptide | | YKQGKMEAAREWLLKGARDDVPPNFQPPAKCLVVAVSHPFEEWDI |
| sequence | | SKTNHDVQAYIYAQPLQAEGHLNGLSEKWEDTSADQHKLWFEKTG |
| | | VPDRGLPVQAINKIAKAAVNRAFGVVRKVENRNEKRRSRDNRIAEH |
| | | NRENGLTEVVREAPEVATNADGFLLHPPGIDPSILSYASVSPVPYNS |
| | | SKHSFVRLPEEYQAYNVEPDAPIPQFVVEDRFAIPPGQPGYVPEW |
| | | QRLKCSTNKHRRMRQWSNQDYKPKAGRRAKPLEFQAHLTRERAK |
| | | GALLVVMRIKEDWVVFDVRGLLRNVEWRKVLSEEAREKLTLKGLLD |
| | | LFTGDPVIDTKRGIVTFLYKAEITKILSKRTVKTKNARDLLLRLTEPGE |
| | | DGLRREVGLVAVDLGQTHPIAAAIYRIGRTSAGALESTVLHRQGLRE |
| | | DQKEKLKEYRKRHTALDSRLRKEAFETLSVEQQKEIVTVSGSGAQI |
| | | TKDKVCNYLGVDPSTLPWEKMGSYTHFISDDFLRRGGDPNIVHFD |
| | | RQPKKGKVSKKSQRIKRSDSQWVGRMRPRLSQETAKARMEADWA |
| | | AQNENEEYKRLARSKQELARWCVNTLLQNTRCITQCDEIWVIEDL |
| | | NVKSLHGKGAREPGWDNFFTPKTENRWFIQILHKTFSELPKHRGE |
| | | HVIEGCPLRTSITCPACSYCDKNSRNGEKFVCVACGATFHADFEVA |
| | | TYNLVRLATTGMPMPKSLERQGGGEKAGGARKARKKAKQVEKIVV |
| | | QANANVTMNGASLHSP |
| Casphi-10 | 294 | MDMLDTETNYATETPAQQQDYSPKPPKKAQRAPKGFSKKARPEKK |
| polypeptide | | PPKPITLFTQKHFSGVRFLKRVIRDASKILKLSESRTITFLEQAIERDG |
| sequence | | SAPPDVTPPVHNTIMAVTRPFEEWPEVILSKALQKHCYALTKKIKIKT |
| | | WPKKGPGKKCLAAWSARTKIPLIPGQVQATNGLFDRIGSIYDGVEK |
| | | KVTNRNANKKLEYDEAIKEGRNPAVPEYETAYNIDGTLINKPGYNPN |
| | | LYITQSRTPRLITEADRPLVEKILWQMVEKKTQSRNQARRARLEKAA |
| | | HLQGLPVPKFVPEKVDRSQKIEIRIIDPLDKIEPYMPQDRMAIKASQD |
| | | GHVPYWQRPFLSKRRNRRVRAGWGKQVSSIQAWLTGALLVIVRLG |
| | | NEAFLADIRGALRNAQWRKLLKPDATYQSLFNLFTGDPVVNTRTNH |
| | | LTMAYREGVVNIVKSRSFKGRQTREHLLTLLGQGKTVAGVSFDLGQ |
| | | KHAAGLLAAHFGLGEDGNPVFTPIQACFLPQRYLDSLTNYRNRYDA |
| | | LTLDMRRQSLLALTPAQQQEFADAQRDPGGQAKRACCLKLNLNPD |
| | | EIRWDLVSGISTMISDLYIERGGDPRDVHQQVETKPKGKRKSEIRIL |
| | | KIRDGKWAYDFRPKIADETRKAQREQLWKLQKASSEFERLSRYKINI |
| | | ARAIANWALQWGRELSGCDIVIPVLEDLNVGSKFFDGKGKWLLGW |
| | | DNRFTPKKENRWFIKVLHKAVAELAPHRGVPVYEVMPHRTSMTCP |
| | | ACHYCHPTNREGDRFECQSCHVVKNTDRDVAPYNILRVAVEGKTL |
| | | DRWQAEKKPQAEPDRPMILIDNQES |
| >sp\|P14739\|UNGI_ | 106 | MTNLSDHEKETGKQLVIQESILMLPEEVEEVIGNKPESDILVHTAYDE |
| BPPB2 Uracil-DNA | | STDENVMLLTSDAPEYKPWALVIQDSNGENKIKML |
| glycosylase | | |
| inhibitor | | |
| Cas12b/C2c1 | 258 | MAVKSIKVKLRLDDMPEIRAGLWKLHKEVNAGVRYYTEWLSLLRQE |
| | | NLYRRSPNGDGEQECDKTAEECKAELLERLRARQVENGHRGPAG |
| | | SDDELLQLARQLYELLVPQAIGAKGDAQQIARKFLSPLADKDAVGG |
| | | LGIAKAGNKPRWVRMREAGEPGWEEEKEKAETRKSADRTADVLR |
| | | ALADFGLKPLMRVYTDSEMSSVEWKPLRKGQAVRTWDRDMFQQA |
| | | IERMMSWESWNQRVGQEYAKLVEQKNRFEQKNFVGQEHLVHLVN |
| | | QLQQDMKEASPGLESKEQTAHYVTGRALRGSDKVFEKWGKLAPD |
| | | APFDLYDAEIKNVQRRNTRRFGSHDLFAKLAEPEYQALWREDASFL |
| | | TRYAVYNSILRKLNHAKMFATFTLPDATAHPIWTRFDKLGGNLHQY |
| | | TFLFNEFGERRHAIRFHKLLKVENGVAREVDDVTVPISMSEQLDNLL |
| | | PRDPNEPIALYFRDYGAEQHFTGEFGGAKIQCRRDQLAHMHRRRG |
| | | ARDVYLNVSVRVQSQSEARGERRPPYAAVFRLVGDNHRAFVHFDK |
| | | LSDYLAEHPDDGKLGSEGLLSGLRVMSVDLGLRTSASISVFRVARK |
| | | DELKPNSKGRVPFFFPIKGNDNLVAVHERSQLLKLPGETESKDLRAI |
| | | REERQRTLRQLRTQLAYLRLLVRCGSEDVGRRERSWAKLIEQPVD |
| | | AANHMTPDWREAFENELQKLKSLHGICSDKEWMDAVYESVRRVW |
| | | RHMGKQVRDWRKDVRSGERPKIRGYAKDWGGNSIEQIEYLERQY |
| | | KFLKSWSFFGKVSGQVIRAEKGSRFAITLREHIDHAKEDRLKKLADR |
| | | IIMEALGYVYALDERGKGKWVAKYPPCQLILLEELSEYQFNNDRPPS |
| | | ENNQLMQWSHRGVFQELINQAQVHDLLVGTMYAAFSSRFDARTG |
| | | APGIRCRRVPARCTQEHNPEPFPWWLNKFVVEHTLDACPLRADDLI |
| | | PTGEGEIFVSPFSAEEGDFHQIHADLNAAQNLQQRLWSDFDISQIRL |
| | | RCDWGEVDGELVLIPRLTGKRTADSYSNKVFYTNTGVTYYERERG |
| | | KKRRKVFAQEKLSEEEAELLVEADEAREKSVVLMRDPSGIINRGNW |
| | | TRQKEFWSMVNQRIEGYLVKQIRSRVPLQDSACENTGDI |
| high fidelity Cas9 | 1423 | MDKKYSIGLAIGTNSVGWAVITDEYKVPSKKFKVLGNTDRHSIKKNLI |
| polypeptide | | GALLFDSGETAEATRLKRTARRRYTRRKNRICYLQEIFSNEMAKVD |
| sequence | | DSFFHRLEESFLVEEDKKHERHPIFGNIVDEVAYHEKYPTIYHLRKK |
| | | LVDSTDKADLRLIYLALAHMIKFRGHFLIEGDLNPDNSDVDKLFIQLV |
| | | QTYNQLFEENPINASGVDAKAILSARLSKSRRLENLIAQLPGEKKNG |
| | | LFGNLIALSLGLTPNFKSNFDLAEDAKLQLSKDTYDDDLDNLLAQIG |
| | | DQYADLFLAAKNLSDAILLSDILRVNTEITKAPLSASMIKRYDEHHQD |
| | | LTLLKALVRQQLPEKYKEIFFDQSKNGYAGYIDGGASQEEFYKFIKPI |
| | | LEKMDGTEELLVKLNREDLLRKQRTFDNGSIPHQIHLGELHAILRRQ |
| | | EDFYPFLKDNREKIEKILTFRIPYYVGPLARGNSRFAWMTRKSEETIT |
| | | PWNFEEWDKGASAQSFIERMTAFDKNLPNEKVLPKHSLLYEYFTV |
| | | YNELTKVKYVTEGMRKPAFLSGEQKKAIVDLLFKTNRKVTVKQLKE |
| | | DYFKKIECFDSVEISGVEDRFNASLGTYHDLLKIIKDKDFLDNEENED |
| | | ILEDIVLTLTLFEDREMIEERLKTYAHLFDDKVMKQLKRRRYTGWGA |
| | | LSRKLINGIRDKQSGKTILDFLKSDGFANRNFMALIHDDSLTFKEDIQ |
| | | KAQVSGQGDSLHEHIANLAGSPAIKKGILQTVKVVDELVKVMGRHK |
| | | PENIVIEMARENQTTQKGQKNSRERMKRIEEGIKELGSQILKEHPVE |
| | | NTQLQNEKLYLYYLQNGRDMYVDQELDINRLSDYDVDHIVPQSFLK |
| | | DDSIDNKVLTRSDKNRGKSDNVPSEEVVKKMKNYWRQLLNAKLITQ |
| | | RKFDNLTKAERGGLSELDKAGFIKRQLVETRAITKHVAQILDSRMNT |
| | | KYDENDKLIREVKVITLKSKLVSDFRKDFQFYKVREINNYHHAHDAY |
| | | LNAWGTALIKKYPKLESEFVYGDYKVYDVRKMIAKSEQEIGKATAK |
| | | YFFYSNIMNFFKTEITLANGEIRKRPLIETNGETGEIVWDKGRDFATV |
| | | RKVLSMPQVNIVKKTEVQTGGFSKESILPKRNSDKLIARKKDWDPK |
| | | KYGGFDSPTVAYSVLWAKVEKGKSKKLKSVKELLGITIMERSSFEK |
| | | NPIDFLEAKGYKEVKKDLIIKLPKYSLFELENGRKRMLASAGELQKG |
| | | NELALPSKYVNFLYLASHYEKLKGSPEDNEQKQLFVEQHKHYLDEII |
| | | EQISEFSKRVILADANLDKVLSAYNKHRDKPIREQAENIIHLFTLTNLG |
| | | APAAFKYFDTTIDRKRYTSTKEVLDATLIHQSITGLYETRIDLSQLGG |
| | | D |
| Wt Cas9 domain | 233 | ATGGATAAAAAGTATTCTATTGGTTTAGACATCGGCACTAATTCC |
| | | GTTGGATGGGCTGTCATAACCGATGAATACAAAGTACCTTCAAA |
| | | GAAATTTAAGGTGTTGGGGAACACAGACCGTCATTCGATTAAAA |
| | | AGAATCTTATCGGTGCCCTCCTATTCGATAGTGGCGAAACGGCA |
| | | GAGGCGACTCGCCTGAAACGAACCGCTCGGAGAAGGTATACAC |
| | | GTCGCAAGAACCGAATATGTTACTTACAAGAAATTTTTAGCAATG |
| | | AGATGGCCAAAGTTGACGATTCTTTCTTTCACCGTTTGGAAGAGT |
| | | CCTTCCTTGTCGAAGAGGACAAGAAACATGAACGGCACCCCATC |
| | | TTTGGAAACATAGTAGATGAGGTGGCATATCATGAAAAGTACCC |
| | | AACGATTTATCACCTCAGAAAAAAGCTAGTTGACTCAACTGATAA |
| | | AGCGGACCTGAGGTTAATCTACTTGGCTCTTGCCCATATGATAA |
| | | AGTTCCGTGGGCACTTTCTCATTGAGGGTGATCTAAATCCGGAC |
| | | AACTCGGATGTCGACAAACTGTTCATCCAGTTAGTACAAACCTAT |
| | | AATCAGTTGTTTGAAGAGAACCCTATAAATGCAAGTGGCGTGGA |
| | | TGCGAAGGCTATTCTTAGCGCCCGCCTCTCTAAATCCCGACGGC |
| | | TAGAAAACCTGATCGCACAATTACCCGGAGAGAAGAAAAATGGG |
| | | TTGTTCGGTAACCTTATAGCGCTCTCACTAGGCCTGACACCAAA |
| | | TTTTAAGTCGAACTTCGACTTAGCTGAAGATGCCAAATTGCAGCT |
| | | TAGTAAGGACACGTACGATGACGATCTCGACAATCTACTGGCAC |
| | | AAATTGGAGATCAGTATGCGGACTTATTTTTGGCTGCCAAAAACC |
| | | TTAGCGATGCAATCCTCCTATCTGACATACTGAGAGTTAATACTG |
| | | AGATTACCAAGGCGCCGTTATCCGCTTCAATGATCAAAAGGTAC |
| | | GATGAACATCACCAAGACTTGACACTTCTCAAGGCCCTAGTCCG |
| | | TCAGCAACTGCCTGAGAAATATAAGGAAATATTCTTTGATCAGTC |
| | | GAAAAACGGGTACGCAGGTTATATTGACGGCGGAGCGAGTCAA |
| | | GAGGAATTCTACAAGTTTATCAAACCCATATTAGAGAAGATGGAT |
| | | GGGACGGAAGAGTTGCTTGTAAAACTCAATCGCGAAGATCTACT |
| | | GCGAAAGCAGCGGACTTTCGACAACGGTAGCATTCCACATCAAA |
| | | TCCACTTAGGCGAATTGCATGCTATACTTAGAAGGCAGGAGGAT |
| | | TTTTATCCGTTCCTCAAAGACAATCGTGAAAAGATTGAGAAAATC |
| | | CTAACCTTTCGCATACCTTACTATGTGGGACCCCTGGCCCGAGG |
| | | GAACTCTCGGTTCGCATGGATGACAAGAAAGTCCGAAGAAACGA |
| | | TTACTCCATGGAATTTTGAGGAAGTTGTCGATAAAGGTGCGTCA |
| | | GCTCAATCGTTCATCGAGAGGATGACCAACTTTGACAAGAATTTA |
| | | CCGAACGAAAAAGTATTGCCTAAGCACAGTTTACTTTACGAGTAT |
| | | TTCACAGTGTACAATGAACTCACGAAAGTTAAGTATGTCACTGAG |
| | | GGCATGCGTAAACCCGCCTTTCTAAGCGGAGAACAGAAGAAAG |
| | | CAATAGTAGATCTGTTATTCAAGACCAACCGCAAAGTGACAGTTA |
| | | AGCAATTGAAAGAGGACTACTTTAAGAAAATTGAATGCTTCGATT |
| | | CTGTCGAGATCTCCGGGGTAGAAGATCGATTTAATGCGTCACTT |
| | | GGTACGTATCATGACCTCCTAAAGATAATTAAAGATAAGGACTTC |
| | | CTGGATAACGAAGAGAATGAAGATATCTTAGAAGATATAGTGTTG |
| | | ACTCTTACCCTCTTTGAAGATCGGGAAATGATTGAGGAAAGACT |
| | | AAAAACATACGCTCACCTGTTCGACGATAAGGTTATGAAACAGTT |
| | | AAAGAGGCGTCGCTATACGGGCTGGGGACGATTGTCGCGGAAA |
| | | CTTATCAACGGGATAAGAGACAAGCAAAGTGGTAAAACTATTCT |
| | | CGATTTTCTAAAGAGCGACGGCTTCGCCAATAGGAACTTTATGC |
| | | AGCTGATCCATGATGACTCTTTAACCTTCAAAGAGGATATACAAA |
| | | AGGCACAGGTTTCCGGACAAGGGGACTCATTGCACGAACATATT |
| | | GCGAATCTTGCTGGTTCGCCAGCCATCAAAAAGGGCATACTCCA |
| | | GACAGTCAAAGTAGTGGATGAGCTAGTTAAGGTCATGGGACGTC |
| | | ACAAACCGGAAAACATTGTAATCGAGATGGCACGCGAAAATCAA |
| | | ACGACTCAGAAGGGGCAAAAAAACAGTCGAGAGCGGATGAAGA |
| | | GAATAGAAGAGGGTATTAAAGAACTGGGCAGCCAGATCTTAAAG |
| | | GAGCATCCTGTGGAAAATACCCAATTGCAGAACGAGAAACTTTA |
| | | CCTCTATTACCTACAAAATGGAAGGGACATGTATGTTGATCAGG |
| | | AACTGGACATAAACCGTTTATCTGATTACGACGTCGATCACATTG |
| | | TACCCCAATCCTTTTTGAAGGACGATTCAATCGACAATAAAGTGC |
| | | TTACACGCTCGGATAAGAACCGAGGGAAAAGTGACAATGTTCCA |
| | | AGCGAGGAAGTCGTAAAGAAAATGAAGAACTATTGGCGGCAGCT |
| | | CCTAAATGCGAAACTGATAACGCAAAGAAAGTTCGATAACTTAAC |
| | | TAAAGCTGAGAGGGGTGGCTTGTCTGAACTTGACAAGGCCGGA |
| | | TTTATTAAACGTCAGCTCGTGGAAACCCGCCAAATCACAAAGCA |
| | | TGTTGCACAGATACTAGATTCCCGAATGAATACGAAATACGACG |
| | | AGAACGATAAGCTGATTCGGGAAGTCAAAGTAATCACTTTAAAGT |
| | | CAAAATTGGTGTCGGACTTCAGAAAGGATTTTCAATTCTATAAAG |
| | | TTAGGGAGATAAATAACTACCACCATGCGCACGACGCTTATCTT |
| | | AATGCCGTCGTAGGGACCGCACTCATTAAGAAATACCCGAAGCT |
| | | AGAAAGTGAGTTTGTGTATGGTGATTACAAAGTTTATGACGTCCG |
| | | TAAGATGATCGCGAAAAGCGAACAGGAGATAGGCAAGGCTACA |
| | | GCCAAATACTTCTTTTATTCTAACATTATGAATTTCTTTAAGACGG |
| | | AAATCACTCTGGCAAACGGAGAGATACGCAAACGACCTTTAATT |
| | | GAAACCAATGGGGAGACAGGTGAAATCGTATGGGATAAGGGCC |
| | | GGGACTTCGCGACGGTGAGAAAAGTTTTGTCCATGCCCCAAGTC |
| | | AACATAGTAAAGAAAACTGAGGTGCAGACCGGAGGGTTTTCAAA |
| | | GGAATCGATTCTTCCAAAAAGGAATAGTGATAAGCTCATCGCTC |
| | | GTAAAAAGGACTGGGACCCGAAAAAGTACGGTGGCTTCGATAG |
| | | CCCTACAGTTGCCTATTCTGTCCTAGTAGTGGCAAAAGTTGAGA |
| | | AGGGAAAATCCAAGAAACTGAAGTCAGTCAAAGAATTATTGGGG |
| | | ATAACGATTATGGAGCGCTCGTCTTTTGAAAAGAACCCCATCGA |
| | | CTTCCTTGAGGCGAAAGGTTACAAGGAAGTAAAAAAGGATCTCA |
| | | TAATTAAACTACCAAAGTATAGTCTGTTTGAGTTAGAAAATGGCC |
| | | GAAAACGGATGTTGGCTAGCGCCGGAGAGCTTCAAAAGGGGAA |
| | | CGAACTCGCACTACCGTCTAAATACGTGAATTTCCTGTATTTAGC |
| | | GTCCCATTACGAGAAGTTGAAAGGTTCACCTGAAGATAACGAAC |
| | | AGAAGCAACTTTTTGTTGAGCAGCACAAACATTATCTCGACGAAA |
| | | TCATAGAGCAAATTTCGGAATTCAGTAAGAGAGTCATCCTAGCT |
| | | GATGCCAATCTGGACAAAGTATTAAGCGCATACAACAAGCACAG |
| | | GGATAAACCCATACGTGAGCAGGCGGAAAATATTATCCATTTGT |
| | | TTACTCTTACCAACCTCGGCGCTCCAGCCGCATTCAAGTATTTTG |
| | | ACACAACGATAGATCGCAAACGATACACTTCTACCAAGGAGGTG |
| | | CTAGACGCGACACTGATTCACCAATCCATCACGGGATTATATGA |
| | | AACTCGGATAGATTTGTCACAGCTTGGGGGTGACGGATCCCCCA |
| | | AGAAGAAGAGGAAAGTCTCGAGCGACTACAAAGACCATGACGG |
| | | TGATTATAAAGATCATGACATCGATTACAAGGATGACGATGACAA |
| | | GGCTGCAGGA |
| wild-type Cas9 | 234 | MDKKYSIGLAIGTNSVGWAVITDEYKVPSKKFKVLGNTDRHSIKKNLI |
| polypeptide | | GALLFDSGETAEATRLKRTARRRYTRRKNRICYLQEIFSNEMAKVD |
| sequence | | DSFFHRLEESFLVEEDKKHERHPIFGNIVDEVAYHEKYPTIYHLRKK |
| | | LVDSTDKADLRLIYLALAHMIKFRGHFLIEGDLNPDNSDVDKLFIQLV |
| | | QTYNQLFEENPINASGVDAKAILSARLSKSRRLENLIAQLPGEKKNG |
| | | LFGNLIALSLGLTPNFKSNFDLAEDAKLQLSKDTYDDDLDNLLAQIG |
| | | DQYADLFLAAKNLSDAILLSDILRVNTEITKAPLSASMIKRYDEHHQD |
| | | LTLLKALVRQQLPEKYKEIFFDQSKNGYAGYIDGGASQEEFYKFIKPI |
| | | LEKMDGTEELLVKLNREDLLRKQRTFDNGSIPHQIHLGELHAILRRQ |
| | | EDFYPFLKDNREKIEKILTFRIPYYVGPLARGNSRFAWMTRKSEETIT |
| | | PWNFEEWDKGASAQSFIERMTNFDKNLPNEKVLPKHSLLYEYFTV |
| | | YNELTKVKYVTEGMRKPAFLSGEQKKAIVDLLFKTNRKVTVKQLKE |
| | | DYFKKIECFDSVEISGVEDRFNASLGTYHDLLKIIKDKDFLDNEENED |
| | | ILEDIVLTLTLFEDREMIEERLKTYAHLFDDKVMKQLKRRRYTGWGR |
| | | LSRKLINGIRDKQSGKTILDFLKSDGFANRNFMQLIHDDSLTFKEDIQ |
| | | KAQVSGQGDSLHEHIANLAGSPAIKKGILQTVKVVDELVKVMGRHK |
| | | PENIVIEMARENQTTQKGQKNSRERMKRIEEGIKELGSQILKEHPVE |
| | | NTQLQNEKLYLYYLQNGRDMYVDQELDINRLSDYDVDHIVPQSFLK |
| | | DDSIDNKVLTRSDKNRGKSDNVPSEEVVKKMKNYWRQLLNAKLITQ |
| | | RKFDNLTKAERGGLSELDKAGFIKRQLVETRQITKHVAQILDSRMNT |
| | | KYDENDKLIREVKVITLKSKLVSDFRKDFQFYKVREINNYHHAHDAY |
| | | LNAVVGTALIKKYPKLESEFVYGDYKVYDVRKMIAKSEQEIGKATAK |
| | | YFFYSNIMNFFKTEITLANGEIRKRPLIETNGETGEIVWDKGRDFATV |
| | | RKVLSMPQVNIVKKTEVQTGGFSKESILPKRNSDKLIARKKDWDPK |
| | | KYGGFDSPTVAYSVLVVAKVEKGKSKKLKSVKELLGITIMERSSFEK |
| | | NPIDFLEAKGYKEVKKDLIIKLPKYSLFELENGRKRMLASAGELQKG |
| | | NELALPSKYVNFLYLASHYEKLKGSPEDNEQKQLFVEQHKHYLDEII |
| | | EQISEFSKRVILADANLDKVLSAYNKHRDKPIREQAENIIHLFTLTNLG |
| | | APAAFKYFDTTIDRKRYTSTKEVLDATLIHQSITGLYETRIDLSQLGG |
| | | D |
| PAM-binding | 1304 | MDKKYSIGLAIGTNSVGWAVITDEYKVPSKKFKVLGNTDRHSIKKNLI |
| SpEQR Cas9 | | GALLFDSGETAEATRLKRTARRRYTRRKNRICYLQEIFSNEMAKVD |
| polypeptide | | DSFFHRLEESVLVEEDKKHERHPIFGNIVDEVAYHEKYPTIYHLRKK |
| sequence | | LVDSTDKADLRLIYLALAHMIKFRGHFLIEGDLNPDNSDVDKLFIQLV |
| | | QTYNQLFEENPINASGVDAKAILSARLSKSRRLENLIAQLPGEKKNG |
| | | LFGNLIALSLGLTPNFKSNFDLAEDAKLQLSKDTYDDDLDNLLAQIG |
| | | DQYADLFLAAKNLSDAILLSDILRVNTEITKAPLSASMIKRYDEHHQD |
| | | LTLLKALVRQQLPEKYKEIFFDQSKNGYAGYIDGGASQEEFYKFIKPI |
| | | LEKMDGTEELLVKLNREDLLRKQRTFDNGSIPHQIHLGELHAILRRQ |
| | | EDFYPFLKDNREKIEKILTFRIPYYVGPLARGNSRFAWMTRKSEETIT |
| | | PWNFEEWDKGASAQSFIERMTNFDKNLPNEKVLPKHSLLYEYFTV |
| | | YNELTKVKYVTEGMRKPAFLSGEQKKAIVDLLFKTNRKVTVKQLKE |
| | | DYFKKIECFDSVEISGVEDRFNASLGTYHDLLKIIKDKDFLDNEENED |
| | | ILEDIVLTLTLFEDREMIEERLKTYAHLFDDKVMKQLKRRRYTGWGR |
| | | LSRKLINGIRDKQSGKTILDFLKSDGFANRNFMQLIHDDSLTFKEDIQ |
| | | KAQVSGQGDSLHEHIANLAGSPAIKKGILQTVKVVDELVKVMGRHK |
| | | PENIVIEMARENQTTQKGQKNSRERMKRIEEGIKELGSQILKEHPVE |
| | | NTQLQNEKLYLYYLQNGRDMYVDQELDINRLSDYDVDHIVPQSFLK |
| | | DDSIDNKVLTRSDKNRGKSDNVPSEEVVKKMKNYWRQLLNAKLITQ |
| | | RKFDNLTKAERGGLSELDKAGFIKRQLVETRQITKHVAQILDSRMNT |
| | | KYDENDKLIREVKVITLKSKLVSDFRKDFQFYKVREINNYHHAHDAY |
| | | LNAVVGTALIKKYPKLESEFVYGDYKVYDVRKMIAKSEQEIGKATAK |
| | | YFFYSNIMNFFKTEITLANGEIRKRPLIETNGETGEIVWDKGRDFATV |
| | | RKVLSMPQVNIVKKTEVQTGGFSKESILPKRNSDKLIARKKDWDPK |
| | | KYGGFESPTVAYSVLVVAKVEKGKSKKLKSVKELLGITIMERSSFEK |
| | | NPIDFLEAKGYKEVKKDLIIKLPKYSLFELENGRKRMLASAGELQKG |
| | | NELALPSKYVNFLYLASHYEKLKGSPEDNEQKQLFVEQHKHYLDEII |
| | | EQISEFSKRVILADANLDKVLSAYNKHRDKPIREQAENIIHLFTLTNLG |
| | | APAAFKYFDTTIDRKQYRSTKEVLDATLIHQSITGLYETRIDLSQLGG |
| | | D |
| PAM-binding | 1305 | MDKKYSIGLAIGTNSVGWAVITDEYKVPSKKFKVLGNTDRHSIKKNLI |
| SpVQR Cas9 | | GALLFDSGETAEATRLKRTARRRYTRRKNRICYLQEIFSNEMAKVD |
| polypeptide | | DSFFHRLEESFLVEEDKKHERHPIFGNIVDEVAYHEKYPTIYHLRKK |
| sequence | | LVDSTDKADLRLIYLALAHMIKFRGHFLIEGDLNPDNSDVDKLFIQLV |
| | | QTYNQLFEENPINASGVDAKAILSARLSKSRRLENLIAQLPGEKKNG |
| | | LFGNLIALSLGLTPNFKSNFDLAEDAKLQLSKDTYDDDLDNLLAQIG |
| | | DQYADLFLAAKNLSDAILLSDILRVNTEITKAPLSASMIKRYDEHHQD |
| | | LTLLKALVRQQLPEKYKEIFFDQSKNGYAGYIDGGASQEEFYKFIKPI |
| | | LEKMDGTEELLVKLNREDLLRKQRTFDNGSIPHQIHLGELHAILRRQ |
| | | EDFYPFLKDNREKIEKILTFRIPYYVGPLARGNSRFAWMTRKSEETIT |
| | | PWNFEEWDKGASAQSFIERMTNFDKNLPNEKVLPKHSLLYEYFTV |
| | | YNELTKVKYVTEGMRKPAFLSGEQKKAIVDLLFKTNRKVTVKQLKE |
| | | DYFKKIECFDSVEISGVEDRFNASLGTYHDLLKIIKDKDFLDNEENED |
| | | ILEDIVLTLTLFEDREMIEERLKTYAHLFDDKVMKQLKRRRYTGWGR |
| | | LSRKLINGIRDKQSGKTILDFLKSDGFANRNFMQLIHDDSLTFKEDIQ |
| | | KAQVSGQGDSLHEHIANLAGSPAIKKGILQTVKVVDELVKVMGRHK |
| | | PENIVIEMARENQTTQKGQKNSRERMKRIEEGIKELGSQILKEHPVE |
| | | NTQLQNEKLYLYYLQNGRDMYVDQELDINRLSDYDVDHIVPQSFLK |
| | | DDSIDNKVLTRSDKNRGKSDNVPSEEVVKKMKNYWRQLLNAKLITQ |
| | | RKFDNLTKAERGGLSELDKAGFIKRQLVETRQITKHVAQILDSRMNT |
| | | KYDENDKLIREVKVITLKSKLVSDFRKDFQFYKVREINNYHHAHDAY |
| | | LNAVVGTALIKKYPKLESEFVYGDYKVYDVRKMIAKSEQEIGKATAK |
| | | YFFYSNIMNFFKTEITLANGEIRKRPLIETNGETGEIVWDKGRDFATV |
| | | RKVLSMPQVNIVKKTEVQTGGFSKESILPKRNSDKLIARKKDWDPK |
| | | KYGGFVSPTVAYSVLVVAKVEKGKSKKLKSVKELLGITIMERSSFEK |
| | | NPIDFLEAKGYKEVKKDLIIKLPKYSLFELENGRKRMLASAGELQKG |
| | | NELALPSKYVNFLYLASHYEKLKGSPEDNEQKQLFVEQHKHYLDEII |
| | | EQISEFSKRVILADANLDKVLSAYNKHRDKPIREQAENIIHLFTLTNLG |
| | | APAAFKYFDTTIDRKQYRSTKEVLDATLIHQSITGLYETRIDLSQLGG |
| | | D |
| SpVQR Cas9 | 1306 | MDKKYSIGLAIGTNSVGWAVITDEYKVPSKKFKVLGNTDRHSIKKNLI |
| polypeptide | | GALLFDSGETAEATRLKRTARRRYTRRKNRICYLQEIFSNEMAKVD |
| sequence | | DSFFHRLEESFLVEEDKKHERHPIFGNIVDEVAYHEKYPTIYHLRKK |
| | | LVDSTDKADLRLIYLALAHMIKFRGHFLIEGDLNPDNSDVDKLFIQLV |
| | | QTYNQLFEENPINASGVDAKAILSARLSKSRRLENLIAQLPGEKKNG |
| | | LFGNLIALSLGLTPNFKSNFDLAEDAKLQLSKDTYDDDLDNLLAQIG |
| | | DQYADLFLAAKNLSDAILLSDILRVNTEITKAPLSASMIKRYDEHHQD |
| | | LTLLKALVRQQLPEKYKEIFFDQSKNGYAGYIDGGASQEEFYKFIKPI |
| | | LEKMDGTEELLVKLNREDLLRKQRTFDNGSIPHQIHLGELHAILRRQ |
| | | EDFYPFLKDNREKIEKILTFRIPYYVGPLARGNSRFAWMTRKSEETIT |
| | | PWNFEEVVDKGASAQSFIERMTNFDKNLPNEKVLPKHSLLYEYFTV |
| | | YNELTKVKYVTEGMRKPAFLSGEQKKAIVDLLFKTNRKVTVKQLKE |
| | | DYFKKIECFDSVEISGVEDRFNASLGTYHDLLKIIKDKDFLDNEENED |
| | | ILEDIVLTLTLFEDREMIEERLKTYAHLFDDKVMKQLKRRRYTGWGR |
| | | LSRKLINGIRDKQSGKTILDFLKSDGFANRNFMQLIHDDSLTFKEDIQ |
| | | KAQVSGQGDSLHEHIANLAGSPAIKKGILQTVKVVDELVKVMGRHK |
| | | PENIVIEMARENQTTQKGQKNSRERMKRIEEGIKELGSQILKEHPVE |
| | | NTQLQNEKLYLYYLQNGRDMYVDQELDINRLSDYDVDHIVPQSFLK |
| | | DDSIDNKVLTRSDKNRGKSDNVPSEEVVKKMKNYWRQLLNAKLITQ |
| | | RKFDNLTKAERGGLSELDKAGFIKRQLVETRQITKHVAQILDSRMNT |
| | | KYDENDKLIREVKVITLKSKLVSDFRKDFQFYKVREINNYHHAHDAY |
| | | LNAVVGTALIKKYPKLESEFVYGDYKVYDVRKMIAKSEQEIGKATAK |
| | | YFFYSNIMNFFKTEITLANGEIRKRPLIETNGETGEIVWDKGRDFATV |
| | | RKVLSMPQVNIVKKTEVQTGGFSKESILPKRNSDKLIARKKDWDPK |
| | | KYGGFVSPTVAYSVLWAKVEKGKSKKLKSVKELLGITIMERSSFEK |
| | | NPIDFLEAKGYKEVKKDLIIKLPKYSLFELENGRKRMLASARELQKG |
| | | NELALPSKYVNFLYLASHYEKLKGSPEDNEQKQLFVEQHKHYLDEII |
| | | EQISEFSKRVILADANLDKVLSAYNKHRDKPIREQAENIIHLFTLTNLG |
| | | APAAFKYFDTTIDRKEYRSTKEVLDATLIHQSITGLYETRIDLSQLGG |
| | | D |
| SpyMacCas9 | 1307 | MDKKYSIGLDIGTNSVGWAVITDDYKVPSKKFKVLGNTDRHSIKKNL |
| polypeptide | | IGALLFGSGETAEATRLKRTARRRYTRRKNRICYLQEIFSNEMAKVD |
| sequence | | DSFFHRLEESFLVEEDKKHERHPIFGNIVDEVAYHEKYPTIYHLRKK |
| | | LADSTDKADLRLIYLALAHMIKFRGHFLIEGDLNPDNSDVDKLFIQLV |
| | | QIYNQLFEENPINASRVDAKAILSARLSKSRRLENLIAQLPGEKRNGL |
| | | FGNLIALSLGLTPNFKSNFDLAEDAKLQLSKDTYDDDLDNLLAQIGD |
| | | QYADLFLAAKNLSDAILLSDILRVNSEITKAPLSASMIKRYDEHHQDL |
| | | TLLKALVRQQLPEKYKEIFFDQSKNGYAGYIDGGASQEEFYKFIKPIL |
| | | EKMDGTEELLVKLNREDLLRKQRTFDNGSIPHQIHLGELHAILRRQE |
| | | DFYPFLKDNREKIEKILTFRIPYYVGPLARGNSRFAWMTRKSEETITP |
| | | WNFEEWDKGASAQSFIERMTNFDKNLPNEKVLPKHSLLYEYFTVY |
| | | NELTKVKYVTEGMRKPAFLSGEQKKAIVDLLFKTNRKVTVKQLKED |
| | | YFKKIECFDSVEISGVEDRFNASLGAYHDLLKIIKDKDFLDNEENEDI |
| | | LEDIVLTLTLFEDRGMIEERLKTYAHLFDDKVMKQLKRRRYTGWGR |
| | | LSRKLINGIRDKQSGKTILDFLKSDGFANRNFMQLIHDDSLTFKEDIQ |
| | | KAQVSGQGHSLHEQIANLAGSPAIKKGILQTVKIVDELVKVMGHKPE |
| | | NMEMARENQTTQKGQKNSRERMKRIEEGIKELGSQILKEHPVENT |
| | | QLQNEKLYLYYLQNGRDMYVDQELDINRLSDYDVDHIVPQSFIKDD |
| | | SIDNKVLTRSDKNRGKSDNVPSEEWKKMKNYWRQLLNAKLITQRK |
| | | FDNLTKAERGGLSELDKAGFIKRQLVETRQITKHVAQILDSRMNTKY |
| | | DENDKLIREVKVITLKSKLVSDFRKDFQFYKVREINNYHHAHDAYLN |
| | | AWGTALIKKYPKLESEFVYGDYKVYDVRKMIAKSEQEIGKATAKYF |
| | | FYSNIMNFFKTEITLANGEIRKRPLIETNGETGEIVWDKGRDFATVRK |
| | | VLSMPQVNIVKKTEIQTVGQNGGLFDDNPKSPLEVTPSKLVPLKKEL |
| | | NPKKYGGYQKPTTAYPVLLITDTKQLIPISVMNKKQFEQNPVKFLRD |
| | | RGYQQVGKNDFIKLPKYTLVDIGDGIKRLWASSKEIHKGNQLVVSKK |
| | | SQILLYHAHHLDSDLSNDYLQNHNQQFDVLFNEIISFSKKCKLGKEHI |
| | | QKIENVYSNKKNSASIEELAESFIKLLGFTQLGATSPFNFLGVKLNQK |
| | | QYKGKKDYILPCTEGTLIRQSITGLYETRVDLSKIGED |
| CP5 polypeptide | 257 | EIGKATAKYFFYSNIMNFFKTEITLANGEIRKRPLIETNGETGEIVWD |
| sequence | | KGRDFATVRKVLSMPQVNIVKKTEVQTGGFSKESILPKRNSDKLIAR |
| | | KKDWDPKKYGGFMQPTVAYSVLVVAKVEKGKSKKLKSVKELLGITI |
| | | MERSSFEKNPIDFLEAKGYKEVKKDLIIKLPKYSLFELENGRKRMLA |
| | | SAKFLQKGNELALPSKYVNFLYLASHYEKLKGSPEDNEQKQLFVEQ |
| | | HKHYLDEIIEQISEFSKRVILADANLDKVLSAYNKHRDKPIREQAENII |
| | | HLFTLTNLGAPRAFKYFDTTIARKEYRSTKEVLDATLIHQSITGLYET |
| | | RIDLSQLGGDGGSGGSGGSGGSGGSGGSGGMDKKYSIGLAIGTN |
| | | SVGWAVITDEYKVPSKKFKVLGNTDRHSIKKNLIGALLFDSGETAEA |
| | | TRLKRTARRRYTRRKNRICYLQEIFSNEMAKVDDSFFHRLEESFLVE |
| | | EDKKHERHPIFGNIVDEVAYHEKYPTIYHLRKKLVDSTDKADLRLIYL |
| | | ALAHMIKFRGHFLIEGDLNPDNSDVDKLFIQLVQTYNQLFEENPINA |
| | | SGVDAKAILSARLSKSRRLENLIAQLPGEKKNGLFGNLIALSLGLTPN |
| | | FKSNFDLAEDAKLQLSKDTYDDDLDNLLAQIGDQYADLFLAAKNLS |
| | | DAILLSDILRVNTEITKAPLSASMIKRYDEHHQDLTLLKALVRQQLPE |
| | | KYKEIFFDQSKNGYAGYIDGGASQEEFYKFIKPILEKMDGTEELLVK |
| | | LNREDLLRKQRTFDNGSIPHQIHLGELHAILRRQEDFYPFLKDNREK |
| | | lEKILTFRIPYYVGPLARGNSRFAWMTRKSEETITPWNFEEVVDKGA |
| | | SAQSFIERMTNFDKNLPNEKVLPKHSLLYEYFTVYNELTKVKYVTEG |
| | | MRKPAFLSGEQKKAIVDLLFKTNRKVTVKQLKEDYFKKIECFDSVEI |
| | | SGVEDRFNASLGTYHDLLKIIKDKDFLDNEENEDILEDIVLTLTLFED |
| | | REMIEERLKTYAHLFDDKVMKQLKRRRYTGWGRLSRKLINGIRDKQ |
| | | SGKTILDFLKSDGFANRNFMQLIHDDSLTFKEDIQKAQVSGQGDSL |
| | | HEHIANLAGSPAIKKGILQTVKWDELVKVMGRHKPENMEMAREN |
| | | QTTQKGQKNSRERMKRIEEGIKELGSQILKEHPVENTQLQNEKLYL |
| | | YYLQNGRDMYVDQELDINRLSDYDVDHIVPQSFLKDDSIDNKVLTR |
| | | SDKNRGKSDNVPSEEWKKMKNYWRQLLNAKLITQRKFDNLTKAE |
| | | RGGLSELDKAGFIKRQLVETRQITKHVAQILDSRMNTKYDENDKLIR |
| | | EVKVITLKSKLVSDFRKDFQFYKVREINNYHHAHDAYLNAVVGTALI |
| | | KKYPKLESEFVYGDYKVYDVRKMIAKSEQEGADKRTADGSEFESP |
| | | KKKRKV |
| Cas12c1 | 266 | MQTKKTHLHLISAKASRKYRRTIACLSDTAKKDLERRKQSGAADPA |
| polypeptide | | QELSCLKTIKFKLEVPEGSKLPSFDRISQIYNALETIEKGSLSYLLFALI |
| sequence | | LSGFRIFPNSSAAKTFASSSCYKNDQFASQIKEIFGEMVKNFIPSELE |
| | | SILKKGRRKNNKDWTEENIKRVLNSEFGRKNSEGSSALFDSFLSKF |
| | | SQELFRKFDSWNEVNKKYLEAAELLDSMLASYGPFDSVCKMIGDS |
| | | DSRNSLPDKSTIAFTNNAEITVDIESSVMPYMAIAALLREYRQSKSKA |
| | | APVAYVQSHLTTTNGNGLSWFFKFGLDLIRKAPVSSKQSTSDGSKS |
| | | LQELFSVPDDKLDGLKFIKEACEALPEASLLCGEKGELLGYQDFRTS |
| | | FAGHIDSWVANYVNRLFELIELVNQLPESIKLPSILTQKNHNLVASLG |
| | | LQEAEVSHSLELFEGLVKNVRQTLKKLAGIDISSSPNEQDIKEFYAFS |
| | | DVLNRLGSIRNQIENAVQTAKKDKIDLESAIEWKEWKKLKKLPKLNG |
| | | LGGGVPKQQELLDKALESVKQIRHYQRIDFERVIQWAVNEHCLETV |
| | | PKFLVDAEKKKINKESSTDFAAKENAVRFLLEGIGAAARGKTDSVSK |
| | | AAYNWFWNNFLAKKDLNRYFINCQGCIYKPPYSKRRSLAFALRSD |
| | | NKDTIEWWEKFETFYKEISKEIEKFNIFSQEFQTFLHLENLRMKLLL |
| | | RRIQKPIPAEIAFFSLPQEYYDSLPPNVAFLALNQEITPSEYITQFNLY |
| | | SSFLNGNLILLRRSRSYLRAKFSWVGNSKLIYAAKEARLWKIPNAYW |
| | | KSDEWKMILDSNVLVFDKAGNVLPAPTLKKVCEREGDLRLFYPLLR |
| | | QLPHDWCYRNPFVKSVGREKNVIEVNKEGEPKVASALPGSLFRLIG |
| | | PAPFKSLLDDCFFNPLDKDLRECMLIVDQEISQKVEAQKVEASLESC |
| | | TYSIAVPIRYHLEEPKVSNQFENVLAIDQGEAGLAYAVFSLKSIGEAE |
| | | TKPIAVGTIRIPSIRRLIHSVSTYRKKKQRLQNFKQNYDSTAFIMREN |
| | | VTGDVCAKIVGLMKEFNAFPVLEYDVKNLESGSRQLSAVYKAVNSH |
| | | FLYFKEPGRDALRKQLWYGGDSWTIDGIEIVTRERKEDGKEGVEKI |
| | | VPLKVFPGRSVSARFTSKTCSCCGRNVFDWLFTEKKAKTNKKFNV |
| | | NSKGELTTADGVIQLFEADRSKGPKFYARRKERTPLTKPIAKGSYSL |
| | | EEIERRVRTNLRRAPKSKQSRDTSQSQYFCVYKDCALHFSGMQAD |
| | | ENAAINIGRRFLTALRKNRRSDFPSNVKISDRLLDN |
| Cas12c2 | 267 | MTKHSIPLHAFRNSGADARKWKGRIALLAKRGKETMRTLQFPLEMS |
| polypeptide | | EPEAAAINTTPFAVAYNAIEGTGKGTLFDYWAKLHLAGFRFFPSGG |
| sequence | | AATIFRQQAVFEDASWNAAFCQQSGKDWPWLVPSKLYERFTKAPR |
| | | EVAKKDGSKKSIEFTQENVANESHVSLVGASITDKTPEDQKEFFLK |
| | | MAGALAEKFDSWKSANEDRIVAMKVIDEFLKSEGLHLPSLENIAVKC |
| | | SVETKPDNATVAWHDAPMSGVQNLAIGVFATCASRIDNIYDLNGGK |
| | | LSKLIQESATTPNVTALSWLFGKGLEYFRTTDIDTIMQDFNIPASAKE |
| | | SIKPLVESAQAIPTMTVLGKKNYAPFRPNFGGKIDSWIANYASRLML |
| | | LNDILEQIEPGFELPQALLDNETLMSGIDMTGDELKELIEAVYAWVD |
| | | AAKQGLATLLGRGGNVDDAVQTFEQFSAMMDTLNGTLNTISARYV |
| | | RAVEMAGKDEARLEKLIECKFDIPKWCKSVPKLVGISGGLPKVEEEI |
| | | KVMNAAFKDVRARMFVRFEEIAAYVASKGAGMDVYDALEKRELEQI |
| | | KKLKSAVPERAHIQAYRAVLHRIGRAVQNCSEKTKQLFSSKVIEMG |
| | | VFKNPSHLNNFIFNQKGAIYRSPFDRSRHAPYQLHADKLLKNDWLE |
| | | LLAEISATLMASESTEQMEDALRLERTRLQLQLSGLPDWEYPASLA |
| | | KPDIEVEIQTALKMQLAKDTVTSDVLQRAFNLYSSVLSGLTFKLLRR |
| | | SFSLKMRFSVADTTQLIYVPKVCDWAIPKQYLQAEGEIGIAARVVTE |
| | | SSPAKMVTEVEMKEPKALGHFMQQAPHDWYFDASLGGTQVAGRI |
| | | VEKGKEVGKERKLVGYRMRGNSAYKTVLDKSLVGNTELSQCSMIIE |
| | | IPYTQTVDADFRAQVQAGLPKVSINLPVKETITASNKDEQMLFDRFV |
| | | AIDLGERGLGYAVFDAKTLELQESGHRPIKAITNLLNRTHHYEQRPN |
| | | QRQKFQAKFNVNLSELRENTVGDVCHQINRICAYYNAFPVLEYMVP |
| | | DRLDKQLKSVYESVTNRYIWSSTDAHKSARVQFWLGGETWEHPYL |
| | | KSAKDKKPLVLSPGRGASGKGTSQTCSCCGRNPFDLIKDMKPRAKI |
| | | AVVDGKAKLENSELKLFERNLESKDDMLARRHRNERAGMEQPLTP |
| | | GNYTVDEIKALLRANLRRAPKNRRTKDTTVSEYHCVFSDCGKTMHA |
| | | DENAAVNIGGKFIADIEK |
| OspCas12c | 268 | MTKLRHRQKKLTHDWAGSKKREVLGSNGKLQNPLLMPVKKGQVT |
| polypeptide | | EFRKAFSAYARATKGEMTDGRKNMFTHSFEPFKTKPSLHQCELAD |
| sequence | | KAYQSLHSYLPGSLAHFLLSAHALGFRIFSKSGEATAFQASSKIEAY |
| | | ESKLASELACVDLSIQNLTISTLFNALTTSVRGKGEETSADPLIARFY |
| | | TLLTGKPLSRDTQGPERDLAEVISRKIASSFGTWKEMTANPLQSLQ |
| | | FFEEELHALDANVSLSPAFDVLIKMNDLQGDLKNRTIVFDPDAPVFE |
| | | YNAEDPADIIIKLTARYAKEAVIKNQNVGNYVKNAITTTNANGLGWLL |
| | | NKGLSLLPVSTDDELLEFIGVERSHPSCHALIELIAQLEAPELFEKNV |
| | | FSDTRSEVQGMIDSAVSNHIARLSSSRNSLSMDSEELERLIKSFQIH |
| | | TPHCSLFIGAQSLSQQLESLPEALQSGVNSADILLGSTQYMLTNSLV |
| | | EESIATYQRTLNRINYLSGVAGQINGAIKRKAIDGEKIHLPAAWSELIS |
| | | LPFIGQPVIDVESDLAHLKNQYQTLSNEFDTLISALQKNFDLNFNKAL |
| | | LNRTQHFEAMCRSTKKNALSKPEIVSYRDLLARLTSCLYRGSLVLR |
| | | RAGIEVLKKHKIFESNSELREHVHERKHFVFVSPLDRKAKKLLRLTD |
| | | SRPDLLHVIDEILQHDNLENKDRESLWLVRSGYLLAGLPDQLSSSFI |
| | | NLPIITQKGDRRLIDLIQYDQINRDAFVMLVTSAFKSNLSGLQYRANK |
| | | QSFVVTRTLSPYLGSKLVYVPKDKDWLVPSQMFEGRFADILQSDY |
| | | MVWKDAGRLCVIDTAKHLSNIKKSVFSSEEVLAFLRELPHRTFIQTE |
| | | VRGLGVNVDGIAFNNGDIPSLKTFSNCVQVKVSRTNTSLVQTLNRW |
| | | FEGGKVSPPSIQFERAYYKKDDQIHEDAAKRKIRFQMPATELVHAS |
| | | DDAGWTPSYLLGIDPGEYGMGLSLVSINNGEVLDSGFIHINSLINFA |
| | | SKKSNHQTKVVPRQQYKSPYANYLEQSKDSAAGDIAHILDRLIYKLN |
| | | ALPVFEALSGNSQSAADQVWTKVLSFYTWGDNDAQNSIRKQHWF |
| | | GASHWDIKGMLRQPPTEKKPKPYIAFPGSQVSSYGNSQRCSCCGR |
| | | NPIEQLREMAKDTSIKELKIRNSEIQLFDGTIKLFNPDPSTVIERRRHN |
| | | LGPSRIPVADRTFKNISPSSLEFKELITIVSRSIRHSPEFIAKKRGIGSE |
| | | YFCAYSDCNSSLNSEANAAANVAQKFQKQLFFEL |
| Cas12g1 | 269 | MAQASSTPAVSPRPRPRYREERTLVRKLLPRPGQSKQEFRENVKK |
| polypeptide | | LRKAFLQFNADVSGVCQWAIQFRPRYGKPAEPTETFWKFFLEPET |
| sequence | | SLPPNDSRSPEFRRLQAFEAAAGINGAAALDDPAFTNELRDSILAVA |
| | | SRPKTKEAQRLFSRLKDYQPAHRMILAKVAAEWIESRYRRAHQNW |
| | | ERNYEEWKKEKQEWEQNHPELTPEIREAFNQIFQQLEVKEKRVRIC |
| | | PAARLLQNKDNCQYAGKNKHSVLCNQFNEFKKNHLQGKAIKFFYK |
| | | DAEKYLRCGLQSLKPNVQGPFREDWNKYLRYMNLKEETLRGKNG |
| | | GRLPHCKNLGQECEFNPHTALCKQYQQQLSSRPDLVQHDELYRK |
| | | WRREYWREPRKPVFRYPSVKRHSIAKIFGENYFQADFKNSVVGLR |
| | | LDSMPAGQYLEFAFAPWPRNYRPQPGETEISSVHLHFVGTRPRIGF |
| | | RFRVPHKRSRFDCTQEELDELRSRTFPRKAQDQKFLEAARKRLLET |
| | | FPGNAEQELRLLAVDLGTDSARAAFFIGKTFQQAFPLKIVKIEKLYEQ |
| | | WPNQKQAGDRRDASSKQPRPGLSRDHVGRHLQKMRAQASEIAQK |
| | | RQELTGTPAPETTTDQAAKKATLQPFDLRGLTVHTARMIRDWARLN |
| | | ARQIIQLAEENQVDLIVLESLRGFRPPGYENLDQEKKRRVAFFAHGR |
| | | IRRKVTEKAVERGMRVVTVPYLASSKVCAECRKKQKDNKQWEKNK |
| | | KRGLFKCEGCGSQAQVDENAARVLGRVFWGEIELPTAIP |
| Cas12h1 | 270 | MKVHEIPRSQLLKIKQYEGSFVEWYRDLQEDRKKFASLLFRWAAFG |
| polypeptide | | YAAREDDGATYISPSQALLERRLLLGDAEDVAIKFLDVLFKGGAPSS |
| sequence | | SCYSLFYEDFALRDKAKYSGAKREFIEGLATMPLDKIIERIRQDEQLS |
| | | KIPAEEWLILGAEYSPEEIWEQVAPRIVNVDRSLGKQLRERLGIKCR |
| | | RPHDAGYCKILMEVVARQLRSHNETYHEYLNQTHEMKTKVANNLT |
| | | NEFDLVCEFAEVLEEKNYGLGWYVLWQGVKQALKEQKKPTKIQIAV |
| | | DQLRQPKFAGLLTAKWRALKGAYDTWKLKKRLEKRKAFPYMPNW |
| | | DNDYQIPVGLTGLGVFTLEVKRTEVVVDLKEHGKLFCSHSHYFGDL |
| | | TAEKHPSRYHLKFRHKLKLRKRDSRVEPTIGPWIEAALREITIQKKP |
| | | NGVFYLGLPYALSHGIDNFQIAKRFFSAAKPDKEVINGLPSEMWGA |
| | | ADLNLSNIVAPVKARIGKGLEGPLHALDYGYGELIDGPKILTPDGPR |
| | | CGELISLKRDIVEIKSAIKEFKACQREGLTMSEETTTWLSEVESPSDS |
| | | PRCMIQSRIADTSRRLNSFKYQMNKEGYQDLAEALRLLDAMDSYN |
| | | SLLESYQRMHLSPGEQSPKEAKFDTKRASFRDLLRRRVAHTIVEYF |
| | | DDCDIVFFEDLDGPSDSDSRNNALVKLLSPRTLLLYIRQALEKRGIG |
| | | MVEVAKDGTSQNNPISGHVGWRNKQNKSEIYFYEDKELLVMDADE |
| | | VGAMNILCRGLNHSVCPYSFVTKAPEKKNDEKKEGDYGKRVKRFL |
| | | KDRYGSSNVRFLVASMGFVTVTTKRPKDALVGKRLYYHGGELVTH |
| | | DLHNRMKDEIKYLVEKEVLARRVSLSDSTIKSYKSFAHV |
| Cas12i1 | 271 | MSNKEKNASETRKAYTTKMIPRSHDRMKLLGNFMDYLMDGTPIFFE |
| polypeptide | | LWNQFGGGIDRDIISGTANKDKISDDLLLAVNWFKVMPINSKPQGVS |
| sequence | | PSNLANLFQQYSGSEPDIQAQEYFASNFDTEKHQWKDMRVEYERL |
| | | LAELQLSRSDMHHDLKLMYKEKCIGLSLSTAHYITSVMFGTGAKNN |
| | | RQTKHQFYSKVIQLLEESTQINSVEQLASIILKAGDCDSYRKLRIRCS |
| | | RKGATPSILKIVQDYELGTNHDDEVNVPSLIANLKEKLGRFEYECEW |
| | | KCMEKIKAFLASKVGPYYLGSYSAMLENALSPIKGMTTKNCKFVLK |
| | | QIDAKNDIKYENEPFGKIVEGFFDSPYFESDTNVKWVLHPHHIGESN |
| | | IKTLWEDLNAIHSKYEEDIASLSEDKKEKRIKVYQGDVCQTINTYCEE |
| | | VGKEAKTPLVQLLRYLYSRKDDIAVDKIIDGITFLSKKHKVEKQKINP |
| | | VIQKYPSFNFGNNSKLLGKIISPKDKLKHNLKCNRNQVDNYIWIEIKV |
| | | LNTKTMRWEKHHYALSSTRFLEEVYYPATSENPPDALAARFRTKTN |
| | | GYEGKPALSAEQIEQIRSAPVGLRKVKKRQMRLEAARQQNLLPRYT |
| | | WGKDFNINICKRGNNFEVTLATKVKKKKEKNYKVVLGYDANIVRKN |
| | | TYAAIEAHANGDGVIDYNDLPVKPIESGFVTVESQVRDKSYDQLSY |
| | | NGVKLLYCKPHVESRRSFLEKYRNGTMKDNRGNNIQIDFMKDFEAI |
| | | ADDETSLYYFNMKYCKLLQSSIRNHSSQAKEYREEIFELLRDGKLSV |
| | | LKLSSLSNLSFVMFKVAKSLIGTYFGHLLKKPKNSKSDVKAPPITDE |
| | | DKQKADPEMFALRLALEEKRLNKVKSKKEVIANKIVAKALELRDKYG |
| | | PVLIKGENISDTTKKGKKSSTNSFLMDWLARGVANKVKEMVMMHQ |
| | | GLEFVEVNPNFTSHQDPFVHKNPENTFRARYSRCTPSELTEKNRK |
| | | EILSFLSDKPSKRPTNAYYNEGAMAFLATYGLKKNDVLGVSLEKFK |
| | | QIMANILHQRSEDQLLFPSRGGMFYLATYKLDADATSVNWNGKQF |
| | | WVCNADLVAAYNVGLVDIQKDFKKK |
| Cas12i2 | 272 | MSSAIKSYKSVLRPNERKNQLLKSTIQCLEDGSAFFFKMLQGLFGGI |
| polypeptide | | TPEIVRFSTEQEKQQQDIALWCAVNWFRPVSQDSLTHTIASDNLVE |
| sequence | | KFEEYYGGTASDAIKQYFSASIGESYYWNDCRQQYYDLCRELGVE |
| | | VSDLTHDLEILCREKCLAVATESNQNNSIISVLFGTGEKEDRSVKLRI |
| | | TKKILEAISNLKEIPKNVAPIQEIILNVAKATKETFRQVYAGNLGAPST |
| | | LEKFIAKDGQKEFDLKKLQTDLKKVIRGKSKERDWCCQEELRSYVE |
| | | QNTIQYDLWAWGEMFNKAHTALKIKSTRNYNFAKQRLEQFKEIQSL |
| | | NNLLVVKKLNDFFDSEFFSGEETYTICVHHLGGKDLSKLYKAWEDD |
| | | PADPENAIVVLCDDLKNNFKKEPIRNILRYIFTIRQECSAQDILAAAKY |
| | | NQQLDRYKSQKANPSVLGNQGFTWTNAVILPEKAQRNDRPNSLDL |
| | | RIWLYLKLRHPDGRWKKHHIPFYDTRFFQEIYAAGNSPVDTCQFRT |
| | | PRFGYHLPKLTDQTAIRVNKKHVKAAKTEARIRLAIQQGTLPVSNLKI |
| | | TEISATINSKGQVRIPVKFDVGRQKGTLQIGDRFCGYDQNQTASHA |
| | | YSLWEVVKEGQYHKELGCFVRFISSGDIVSITENRGNQFDQLSYEG |
| | | LAYPQYADWRKKASKFVSLWQITKKNKKKEIVTVEAKEKFDAICKY |
| | | QPRLYKFNKEYAYLLRDIVRGKSLVELQQIRQEIFRFIEQDCGVTRL |
| | | GSLSLSTLETVKAVKGIIYSYFSTALNASKNNPISDEQRKEFDPELFA |
| | | LLEKLELIRTRKKKQKVERIANSLIQTCLENNIKFIRGEGDLSTTNNAT |
| | | KKKANSRSMDWLARGVFNKIRQLAPMHNITLFGCGSLYTSHQDPL |
| | | VHRNPDKAMKCRWAAIPVKDIGDWVLRKLSQNLRAKNIGTGEYYH |
| | | QGVKEFLSHYELQDLEEELLKWRSDRKSNIPCWVLQNRLAEKLGN |
| | | KEAVVYIPVRGGRIYFATHKVATGAVSIVFDQKQVWVCNADHVAAA |
| | | NIALTVKGIGEQSSDEENPDGSRIKLQLTS |
| Linker | 1308 | (GGGS)N |
| Linker | 109 | (GGGGS)N |
| Linker | 1309 | (EAAAK)N |
| Linker | 56 | SGSETPGTSESATPES |
| | 57 | (SGGS)N |
| Linker | 273 | GGSGGS |
| Linker | 1310 | GSSGSETPGTSESATPESSG |
| Linker | 1311 | GGAGGCTCTGGAGGAAGC |
| Linker | 1312 | GGCTCTTCTGGATCTGAAACACCTGGCACAAGCGAGAGCGCCA |
| | | CCCCTGAGAGCTCTGGC |
| AacCas12b | 259 | MAVKSMKVKLRLDNMPEIRAGLWKLHTEVNAGVRYYTEWLSLLRQ |
| polypeptide | | ENLYRRSPNGDGEQECYKTAEECKAELLERLRARQVENGHCGPA |
| sequence | | GSDDELLQLARQLYELLVPQAIGAKGDAQQIARKFLSPLADKDAVG |
| | | GLGIAKAGNKPRWVRMREAGEPGWEEEKAKAEARKSTDRTADVL |
| | | RALADFGLKPLMRVYTDSDMSSVQWKPLRKGQAVRTWDRDMFQ |
| | | QAIERMMSWESWNQRVGEAYAKLVEQKSRFEQKNFVGQEHLVQL |
| | | VNQLQQDMKEASHGLESKEQTAHYLTGRALRGSDKVFEKWEKLD |
| | | PDAPFDLYDTEIKNVQRRNTRRFGSHDLFAKLAEPKYQALWREDA |
| | | SFLTRYAVYNSIVRKLNHAKMFATFTLPDATAHPIWTRFDKLGGNLH |
| | | QYTFLFNEFGEGRHAIRFQKLLTVEDGVAKEVDDVTVPISMSAQLD |
| | | DLLPRDPHELVALYFQDYGAEQHLAGEFGGAKIQYRRDQLNHLHA |
| | | RRGARDVYLNLSVRVQSQSEARGERRPPYAAVFRLVGDNHRAFV |
| | | HFDKLSDYLAEHPDDGKLGSEGLLSGLRVMSVDLGLRTSASISVFR |
| | | VARKDELKPNSEGRVPFCFPIEGNENLVAVHERSQLLKLPGETESK |
| | | DLRAIREERQRTLRQLRTQLAYLRLLVRCGSEDVGRRERSWAKLIE |
| | | QPMDANQMTPDWREAFEDELQKLKSLYGICGDREWTEAVYESVR |
| | | RVWRHMGKQVRDWRKDVRSGERPKIRGYQKDVVGGNSIEQIEYL |
| | | ERQYKFLKSWSFFGKVSGQVIRAEKGSRFAITLREHIDHAKEDRLK |
| | | KLADRHMEALGYVYALDDERGKGKWVAKYPPCQLILLEELSEYQFN |
| | | NDRPPSENNQLMQWSHRGVFQELLNQAQVHDLLVGTMYAAFSSR |
| | | FDARTGAPGIRCRRVPARCAREQNPEPFPWWLNKFVAEHKLDGC |
| | | PLRADDLIPTGEGEFFVSPFSAEEGDFHQIHADLNAAQNLQRRLWS |
| | | DFDISQIRLRCDWGEVDGEPVLIPRTTGKRTADSYGNKVFYTKTGV |
| | | TYYERERGKKRRKVFAQEELSEEEAELLVEADEAREKSVVLMRDP |
| | | SGIINRGDWTRQKEFWSMVNQRIEGYLVKQIRSRVRLQESACENT |
| | | GDI |
| BhCas12b | 260 | MAPKKKRKVGIHGVPAAATRSFILKIEPNEEVKKGLWKTHEVLNHGI |
| polypeptide | | AYYMNILKLIRQEAIYEHHEQDPKNPKKVSKAEIQAELWDFVLKMQK |
| sequence | | CNSFTHEVDKDEVFNILRELYEELVPSSVEKKGEANQLSNKFLYPLV |
| | | DPNSQSGKGTASSGRKPRWYNLKIAGDPSWEEEKKKWEEDKKKD |
| | | PLAKILGKLAEYGLIPLFIPYTDSNEPIVKEIKWMEKSRNQSVRRLDK |
| | | DMFIQALERFLSWESWNLKVKEEYEKVEKEYKTLEERIKEDIQALKA |
| | | LEQYEKERQEQLLRDTLNTNEYRLSKRGLRGWREIIQKWLKMDEN |
| | | EPSEKYLEVFKDYQRKHPREAGDYSVYEFLSKKENHFIWRNHPEY |
| | | PYLYATFCEIDKKKKDAKQQATFTLADPINHPLWRFEERSGSNLN |
| | | KYRILTEQLHTEKLKKKLTVQLDRLIYPTESGGWEEKGKVDIVLLPS |
| | | RQFYNQIFLDIEEKGKHAFTYKDESIKFPLKGTLGGARVQFDRDHLR |
| | | RYPHKVESGNVGRIYFNMTVNIEPTESPVSKSLKIHRDDFPKVVNFK |
| | | PKELTEWIKDSKGKKLKSGIESLEIGLRVMSIDLGQRQAAAASIFEVV |
| | | DQKPDIEGKLFFPIKGTELYAVHRASFNIKLPGETLVKSREVLRKAR |
| | | EDNLKLMNQKLNFLRNVLHFQQFEDITEREKRVTKWISRQENSDVP |
| | | LVYQDELIQIRELMYKPYKDWVAFLKQLHKRLEVEIGKEVKHWRKS |
| | | LSDGRKGLYGISLKNIDEIDRTRKFLLRWSLRPTEPGEVRRLEPGQR |
| | | FAIDQLNHLNALKEDRLKKMANTIIMHALGYCYDVRKKKWQAKNPA |
| | | CQIILFEDLSNYNPYEERSRFENSKLMKWSRREIPRQVALQGEIYGL |
| | | QVGEVGAQFSSRFHAKTGSPGIRCSVVTKEKLQDNRFFKNLQREG |
| | | RLTLDKIAVLKEGDLYPDKGGEKFISLSKDRKCVTTHADINAAQNLQ |
| | | KRFWTRTHGFYKVYCKAYQVDGQTVYIPESKDQKQKIIEEFGEGYF |
| | | ILKDGVYEWVNAGKLKIKKGSSKQSSSELVDSDILKDSFDLASELKG |
| | | EKLMLYRDPSGNVFPSDKWMAAGVFFGKLERILISKLTNQYSISTIE |
| | | DDSSKQSMKRPAATKKAGQAKKKK |
| BvCas12b (Bacillus | 264 | MAIRSIKLKMKTNSGTDSIYLRKALWRTHQLINEGIAYYMNLLTLYRQ |
| sp. V3-13) | | EAIGDKTKEAYQAELINIIRNQQRNNGSSEEHGSDQEILALLRQLYEL |
| polynucleotide | | IIPSSIGESGDANQLGNKFLYPLVDPNSQSGKGTSNAGRKPRWKRL |
| sequence | | KEEGNPDWELEKKKDEERKAKDPTVKIFDNLNKYGLLPLFPLFTNIQ |
| | | KDIEWLPLGKRQSVRKWDKDMFIQAIERLLSWESWNRRVADEYKQ |
| | | LKEKTESYYKEHLTGGEEWIEKIRKFEKERNMELEKNAFAPNDGYFI |
| | | TSRQIRGWDRVYEKWSKLPESASPEELWKVVAEQQNKMSEGFGD |
| | | PKVFSFLANRENRDIWRGHSERIYHIAAYNGLQKKLSRTKEQATFTL |
| | | PDAIEHPLWIRYESPGGTNLNLFKLEEKQKKNYYVTLSKIIWPSEEK |
| | | WIEKENIEIPLAPSIQFNRQIKLKQHVKGKQEISFSDYSSRISLDGVLG |
| | | GSRIQFNRKYIKNHKELLGEGDIGPVFFNLWDVAPLQETRNGRLQ |
| | | SPIGKALKVISSDFSKVIDYKPKELMDWMNTGSASNSFGVASLLEG |
| | | MRVMSIDMGQRTSASVSIFEVVKELPKDQEQKLFYSINDTELFAIHK |
| | | RSFLLNLPGEVVTKNNKQQRQERRKKRQFVRSQIRMLANVLRLET |
| | | KKTPDERKKAIHKLMEIVQSYDSWTASQKEVWEKELNLLTNMAAFN |
| | | DEIWKESLVELHHRIEPYVGQIVSKWRKGLSEGRKNLAGISMWNID |
| | | ELEDTRRLLISWSKRSRTPGEANRIETDEPFGSSLLQHIQNVKDDRL |
| | | KQMANLIIMTALGFKYDKEEKDRYKRWKETYPACQIILFENLNRYLF |
| | | NLDRSRRENSRLMKWAHRSIPRTVSMQGEMFGLQVGDVRSEYSS |
| | | RFHAKTGAPGIRCHALTEEDLKAGSNTLKRLIEDGFINESELAYLKK |
| | | GDIIPSQGGELFVTLSKRYKKDSDNNELTVIHADINAAQNLQKRFWQ |
| | | QNSEVYRVPCQLARMGEDKLYIPKSQTETIKKYFGKGSFVKNNTEQ |
| | | EVYKWEKSEKMKIKTDTTFDLQDLDGFEDISKTIELAQEQQKKYLTM |
| | | FRDPSGYFFNNETWRPQKEYWSIVNNIIKSCLKKKILSNKVEL |
| BTCas12b.BTCas12b | 265 | MATRSFILKIEPNEEVKKGLWKTHEVLNHGIAYYMNILKLIRQEAIYE |
| polypeptide | | HHEQDPKNPKKVSKAEIQAELWDFVLKMQKCNSFTHEVDKDWFNI |
| sequence | | LRELYEELVPSSVEKKGEANQLSNKFLYPLVDPNSQSGKGTASSG |
| | | RKPRWYNLKIAGDPSWEEEKKKWEEDKKKDPLAKILGKLAEYGLIP |
| | | LFIPFTDSNEPIVKEIKWMEKSRNQSVRRLDKDMFIQALERFLSWES |
| | | WNLKVKEEYEKVEKEHKTLEERIKEDIQAFKSLEQYEKERQEQLLR |
| | | DTLNTNEYRLSKRGLRGWREIIQKWLKMDENEPSEKYLEVFKDYQ |
| | | RKHPREAGDYSVYEFLSKKENHFIWRNHPEYPYLYATFCEIDKKKK |
| | | DAKQQATFTLADPINHPLWVRFEERSGSNLNKYRILTEQLHTEKLKK |
| | | KLTVQLDRLIYPTESGGWEEKGKVDIVLLPSRQFYNQIFLDIEEKGK |
| | | HAFTYKDESIKFPLKGTLGGARVQFDRDHLRRYPHKVESGNVGRIY |
| | | FNMTVNIEPTESPVSKSLKIHRDDFPKFVNFKPKELTEWIKDSKGKK |
| | | LKSGIESLEIGLRVMSIDLGQRQAAAASIFEWDQKPDIEGKLFFPIK |
| | | GTELYAVHRASFNIKLPGETLVKSREVLRKAREDNLKLMNQKLNFL |
| | | RNVLHFQQFEDITEREKRVTKWISRQENSDVPLVYQDELIQIRELMY |
| | | KPYKDWVAFLKQLHKRLEVEIGKEVKHWRKSLSDGRKGLYGISLKN |
| | | IDEIDRTRKFLLRWSLRPTEPGEVRRLEPGQRFAIDQLNHLNALKED |
| | | RLKKMANTIIMHALGYCYDVRKKKWQAKNPACQIILFEDLSNYNPYE |
| | | ERSRFENSKLMKWSRREIPRQVALQGEIYGLQVGEVGAQFSSRFH |
| | | AKTGSPGIRCSWTKEKLQDNRFFKNLQREGRLTLDKIAVLKEGDLY |
| | | PDKGGEKFISLSKDRKLVTTHADINAAQNLQKRFWTRTHGFYKVYC |
| | | KAYQVDGQTVYIPESKDQKQKIIEEFGEGYFILKDGVYEWGNAGKL |
| | | KIKKGSSKQSSSELVDSDILKDSFDLASELKGEKLMLYRDPSGNVFP |
| | | SDKWMAAGVFFGKLERILISKLTNQYSISTIEDDSSKQSM |
| 5′UTR | 261 | GGGAAATAAGAGAGAAAAGAAGAGTAAGAAGAAATATAAGAGCC |
| | | ACC |
| 3′UTR (TriLink | 262 | GCTGGAGCCTCGGTGGCCATGCTTCTTGCCCCTTGGGCCTCCC |
| standard UTR) | | CCCAGCCCCTCCTCCCCTTCCTGCACCCGTACCCCCGTGGTCTT |
| | | TGAATAAAGTCTGA |
| bhCas12b (V4) | 263 | ATGGCCCCAAAGAAGAAGCGGAAGGTCGGTATCCACGGAGTCC |
| polynucleotide | | CAGCAGCCGCCACCAGATCCTTCATCCTGAAGATCGAGCCCAA |
| sequence | | CGAGGAAGTGAAGAAAGGCCTCTGGAAAACCCACGAGGTGCTG |
| | | AACCACGGAATCGCCTACTACATGAATATCCTGAAGCTGATCCG |
| | | GCAAGAGGCCATCTACGAGCACCACGAGCAGGACCCCAAGAAT |
| | | CCCAAGAAGGTGTCCAAGGCCGAGATCCAGGCCGAGCTGTGGG |
| | | ATTTCGTGCTGAAGATGCAGAAGTGCAACAGCTTCACACACGAG |
| | | GTGGACAAGGACGAGGTGTTCAACATCCTGAGAGAGCTGTACG |
| | | AGGAACTGGTGCCCAGCAGCGTGGAAAAGAAGGGCGAAGCCAA |
| | | CCAGCTGAGCAACAAGTTTCTGTACCCTCTGGTGGACCCCAACA |
| | | GCCAGTCTGGAAAGGGAACAGCCAGCAGCGGCAGAAAGCCCA |
| | | GATGGTACAACCTGAAGATTGCCGGCGATCCCTCCTGGGAAGA |
| | | AGAGAAGAAGAAGTGGGAAGAAGATAAGAAAAAGGACCCGCTG |
| | | GCCAAGATCCTGGGCAAGCTGGCTGAGTACGGACTGATCCCTC |
| | | TGTTCATCCCCTACACCGACAGCAACGAGCCCATCGTGAAAGAA |
| | | ATCAAGTGGATGGAAAAGTCCCGGAACCAGAGCGTGCGGCGGC |
| | | TGGATAAGGACATGTTCATTCAGGCCCTGGAACGGTTCCTGAGC |
| | | TGGGAGAGCTGGAACCTGAAAGTGAAAGAGGAATACGAGAAGG |
| | | TCGAGAAAGAGTACAAGACCCTGGAAGAGAGGATCAAAGAGGA |
| | | CATCCAGGCTCTGAAGGCTCTGGAACAGTATGAGAAAGAGCGG |
| | | CAAGAACAGCTGCTGCGGGACACCCTGAACACCAACGAGTACC |
| | | GGCTGAGCAAGAGAGGCCTTAGAGGCTGGCGGGAAATCATCCA |
| | | GAAATGGCTGAAAATGGACGAGAACGAGCCCTCCGAGAAGTAC |
| | | CTGGAAGTGTTCAAGGACTACCAGCGGAAGCACCCTAGAGAGG |
| | | CCGGCGATTACAGCGTGTACGAGTTCCTGTCCAAGAAAGAGAAC |
| | | CACTTCATCTGGCGGAATCACCCTGAGTACCCCTACCTGTACGC |
| | | CACCTTCTGCGAGATCGACAAGAAAAAGAAGGACGCCAAGCAG |
| | | CAGGCCACCTTCACACTGGCCGATCCTATCAATCACCCTCTGTG |
| | | GGTCCGATTCGAGGAAAGAAGCGGCAGCAACCTGAACAAGTAC |
| | | AGAATCCTGACCGAGCAGCTGCACACCGAGAAGCTGAAGAAAA |
| | | AGCTGACAGTGCAGCTGGACCGGCTGATCTACCCTACAGAATCT |
| | | GGCGGCTGGGAAGAGAAGGGCAAAGTGGACATTGTGCTGCTGC |
| | | CCAGCCGGCAGTTCTACAACCAGATCTTCCTGGACATCGAGGAA |
| | | AAGGGCAAGCACGCCTTCACCTACAAGGATGAGAGCATCAAGTT |
| | | CCCTCTGAAGGGCACACTCGGCGGAGCCAGAGTGCAGTTCGAC |
| | | AGAGATCACCTGAGAAGATACCCTCACAAGGTGGAAAGCGGCA |
| | | ACGTGGGCAGAATCTACTTCAACATGACCGTGAACATCGAGCCT |
| | | ACAGAGTCCCCAGTGTCCAAGTCTCTGAAGATCCACCGGGACG |
| | | ACTTCCCCAAGGTGGTCAACTTCAAGCCCAAAGAACTGACCGAG |
| | | TGGATCAAGGACAGCAAGGGCAAGAAACTGAAGTCCGGCATCG |
| | | AGTCCCTGGAAATCGGCCTGAGAGTGATGAGCATCGACCTGGG |
| | | ACAGAGACAGGCCGCTGCCGCCTCTATTTTCGAGGTGGTGGAT |
| | | CAGAAGCCCGACATCGAAGGCAAGCTGTTTTTCCCAATCAAGGG |
| | | CACCGAGCTGTATGCCGTGCACAGAGCCAGCTTCAACATCAAG |
| | | CTGCCCGGCGAGACACTGGTCAAGAGCAGAGAAGTGCTGCGGA |
| | | AGGCCAGAGAGGACAATCTGAAACTGATGAACCAGAAGCTCAAC |
| | | TTCCTGCGGAACGTGCTGCACTTCCAGCAGTTCGAGGACATCAC |
| | | CGAGAGAGAGAAGCGGGTCACCAAGTGGATCAGCAGACAAGAG |
| | | AACAGCGACGTGCCCCTGGTGTACCAGGATGAGCTGATCCAGA |
| | | TCCGCGAGCTGATGTACAAGCCTTACAAGGACTGGGTCGCCTTC |
| | | CTGAAGCAGCTCCACAAGAGACTGGAAGTCGAGATCGGCAAAG |
| | | AAGTGAAGCACTGGCGGAAGTCCCTGAGCGACGGAAGAAAGGG |
| | | CCTGTACGGCATCTCCCTGAAGAACATCGACGAGATCGATCGGA |
| | | CCCGGAAGTTCCTGCTGAGATGGTCCCTGAGGCCTACCGAACC |
| | | TGGCGAAGTGCGTAGACTGGAACCCGGCCAGAGATTCGCCATC |
| | | GACCAGCTGAATCACCTGAACGCCCTGAAAGAAGATCGGCTGA |
| | | AGAAGATGGCCAACACCATCATCATGCACGCCCTGGGCTACTG |
| | | CTACGACGTGCGGAAGAAGAAATGGCAGGCTAAGAACCCCGCC |
| | | TGCCAGATCATCCTGTTCGAGGATCTGAGCAACTACAACCCCTA |
| | | CGAGGAAAGGTCCCGCTTCGAGAACAGCAAGCTCATGAAGTGG |
| | | TCCAGACGCGAGATCCCCAGACAGGTTGCACTGCAGGGCGAGA |
| | | TCTATGGCCTGCAAGTGGGAGAAGTGGGCGCTCAGTTCAGCAG |
| | | CAGATTCCACGCCAAGACAGGCAGCCCTGGCATCAGATGTAGC |
| | | GTCGTGACCAAAGAGAAGCTGCAGGACAATCGGTTCTTCAAGAA |
| | | TCTGCAGAGAGAGGGCAGACTGACCCTGGACAAAATCGCCGTG |
| | | CTGAAAGAGGGCGATCTGTACCCAGACAAAGGCGGCGAGAAGT |
| | | TCATCAGCCTGAGCAAGGATCGGAAGTGCGTGACCACACACGC |
| | | CGACATCAACGCCGCTCAGAACCTGCAGAAGCGGTTCTGGACA |
| | | AGAACCCACGGCTTCTACAAGGTGTACTGCAAGGCCTACCAGGT |
| | | GGACGGCCAGACCGTGTACATCCCTGAGAGCAAGGACCAGAAG |
| | | CAGAAGATCATCGAAGAGTTCGGCGAGGGCTACTTCATTCTGAA |
| | | GGACGGGGTGTACGAATGGGTCAACGCCGGCAAGCTGAAAATC |
| | | AAGAAGGGCAGCTCCAAGCAGAGCAGCAGCGAGCTGGTGGATA |
| | | GCGACATCCTGAAAGACAGCTTCGACCTGGCCTCCGAGCTGAA |
| | | AGGCGAAAAGCTGATGCTGTACAGGGACCCCAGCGGCAATGTG |
| | | TTCCCCAGCGACAAATGGATGGCCGCTGGCGTGTTCTTCGGAA |
| | | AGCTGGAACGCATCCTGATCAGCAAGCTGACCAACCAGTACTCC |
| | | ATCAGCACCATCGAGGACGACAGCAGCAAGCAGTCTATGAAAA |
| | | GGCCGGCGGCCACGAAAAAGGCCGGCCAGGCAAAAAAGAAAAA |
| | | G |
| NLS | 1313 | MAPKKKRKVGIHGVPAA |
| NLS | 1314 | ATGGCCCCAAAGAAGAAGCGGAAGGTCGGTATCCACGGAGTCC |
| | | CAGCAGCC |
| 101 Cas9 TadAins | 1315 | MDKKYSIGLAIGTNSVGWAVITDEYKVPSKKFKVLGNTDRHSIKKNLI |
| 1015 polypeptide | | GALLFDSGETAEATRLKRTARRRYTRRKNRICYLQEIFSNEMAKVD |
| sequence | | DSFFHRLEESFLVEEDKKHERHPIFGNIVDEVAYHEKYPTIYHLRKK |
| | | LVDSTDKADLRLIYLALAHMIKFRGHFLIEGDLNPDNSDVDKLFIQLV |
| | | QTYNQLFEENPINASGVDAKAILSARLSKSRRLENLIAQLPGEKKNG |
| | | LFGNLIALSLGLTPNFKSNFDLAEDAKLQLSKDTYDDDLDNLLAQIG |
| | | DQYADLFLAAKNLSDAILLSDILRVNTEITKAPLSASMIKRYDEHHQD |
| | | LTLLKALVRQQLPEKYKEIFFDQSKNGYAGYIDGGASQEEFYKFIKPI |
| | | LEKMDGTEELLVKLNREDLLRKQRTFDNGSIPHQIHLGELHAILRRQ |
| | | EDFYPFLKDNREKIEKILTFRIPYYVGPLARGNSRFAWMTRKSEETIT |
| | | PWNFEEWDKGASAQSFIERMTNFDKNLPNEKVLPKHSLLYEYFTV |
| | | YNELTKVKYVTEGMRKPAFLSGEQKKAIVDLLFKTNRKVTVKQLKE |
| | | DYFKKIECFDSVEISGVEDRFNASLGTYHDLLKIIKDKDFLDNEENED |
| | | ILEDIVLTLTLFEDREMIEERLKTYAHLFDDKVMKQLKRRRYTGWGR |
| | | LSRKLINGIRDKQSGKTILDFLKSDGFANRNFMQLIHDDSLTFKEDIQ |
| | | KAQVSGQGDSLHEHIANLAGSPAIKKGILQTVKVVDELVKVMGRHK |
| | | PENIVIEMARENQTTQKGQKNSRERMKRIEEGIKELGSQILKEHPVE |
| | | NTQLQNEKLYLYYLQNGRDMYVDQELDINRLSDYDVDHIVPQSFLK |
| | | DDSIDNKVLTRSDKNRGKSDNVPSEEVVKKMKNYWRQLLNAKLITQ |
| | | RKFDNLTKAERGGLSELDKAGFIKRQLVETRQITKHVAQILDSRMNT |
| | | KYDENDKLIREVKVITLKSKLVSDFRKDFQFYKVREINNYHHAHDAY |
| | | LNAVVGTALIKKYPKLESEFVYGDYKVGSSGSETPGTSESATPESS |
| | | GSEVEFSHEYWMRHALTLAKRARDEREVPVGAVLVLNNRVIGEGW |
| | | NRAIGLHDPTAHAEIMALRQGGLVMQNYRLIDATLYVTFEPCVMCA |
| | | GAMIHSRIGRVVFGVRNAKTGAAGSLMDVLHYPGMNHRVEITEGIL |
| | | ADECAALLCYFFRMPRQVFNAQKKAQSSTDYDVRKMIAKSEQEIGK |
| | | ATAKYFFYSNIMNFFKTEITLANGEIRKRPLIETNGETGEIVWDKGRD |
| | | FATVRKVLSMPQVNIVKKTEVQTGGFSKESILPKRNSDKLIARKKDW |
| | | DPKKYGGFDSPTVAYSVLWAKVEKGKSKKLKSVKELLGITIMERSS |
| | | FEKNPIDFLEAKGYKEVKKDLIIKLPKYSLFELENGRKRMLASAGELQ |
| | | KGNELALPSKYVNFLYLASHYEKLKGSPEDNEQKQLFVEQHKHYLD |
| | | EIIEQISEFSKRVILADANLDKVLSAYNKHRDKPIREQAENIIHLFTLTN |
| | | LGAPAAFKYFDTTIDRKRYTSTKEVLDATLIHQSITGLYETRIDLSQL |
| | | GGD |
| 102 Cas9 TadAins | 1316 | MDKKYSIGLAIGTNSVGWAVITDEYKVPSKKFKVLGNTDRHSIKKNLI |
| 1022 polypeptide | | GALLFDSGETAEATRLKRTARRRYTRRKNRICYLQEIFSNEMAKVD |
| sequence | | DSFFHRLEESFLVEEDKKHERHPIFGNIVDEVAYHEKYPTIYHLRKK |
| | | LVDSTDKADLRLIYLALAHMIKFRGHFLIEGDLNPDNSDVDKLFIQLV |
| | | QTYNQLFEENPINASGVDAKAILSARLSKSRRLENLIAQLPGEKKNG |
| | | LFGNLIALSLGLTPNFKSNFDLAEDAKLQLSKDTYDDDLDNLLAQIG |
| | | DQYADLFLAAKNLSDAILLSDILRVNTEITKAPLSASMIKRYDEHHQD |
| | | LTLLKALVRQQLPEKYKEIFFDQSKNGYAGYIDGGASQEEFYKFIKPI |
| | | LEKMDGTEELLVKLNREDLLRKQRTFDNGSIPHQIHLGELHAILRRQ |
| | | EDFYPFLKDNREKIEKILTFRIPYYVGPLARGNSRFAWMTRKSEETIT |
| | | PWNFEEVVDKGASAQSFIERMTNFDKNLPNEKVLPKHSLLYEYFTV |
| | | YNELTKVKYVTEGMRKPAFLSGEQKKAIVDLLFKTNRKVTVKQLKE |
| | | DYFKKIECFDSVEISGVEDRFNASLGTYHDLLKIIKDKDFLDNEENED |
| | | ILEDIVLTLTLFEDREMIEERLKTYAHLFDDKVMKQLKRRRYTGWGR |
| | | LSRKLINGIRDKQSGKTILDFLKSDGFANRNFMQLIHDDSLTFKEDIQ |
| | | KAQVSGQGDSLHEHIANLAGSPAIKKGILQTVKVVDELVKVMGRHK |
| | | PENIVIEMARENQTTQKGQKNSRERMKRIEEGIKELGSQILKEHPVE |
| | | NTQLQNEKLYLYYLQNGRDMYVDQELDINRLSDYDVDHIVPQSFLK |
| | | DDSIDNKVLTRSDKNRGKSDNVPSEEVVKKMKNYWRQLLNAKLITQ |
| | | RKFDNLTKAERGGLSELDKAGFIKRQLVETRQITKHVAQILDSRMNT |
| | | KYDENDKLIREVKVITLKSKLVSDFRKDFQFYKVREINNYHHAHDAY |
| | | LNAWGTALIKKYPKLESEFVYGDYKVYDVRKMIGSSGSETPGTSE |
| | | SATPESSGSEVEFSHEYWMRHALTLAKRARDEREVPVGAVLVLNN |
| | | RVIGEGWNRAIGLHDPTAHAEIMALRQGGLVMQNYRLIDATLYVTF |
| | | EPCVMCAGAMIHSRIGRVVFGVRNAKTGAAGSLMDVLHYPGMNH |
| | | RVEITEGILADECAALLCYFFRMPRQVFNAQKKAQSSTDAKSEQEIG |
| | | KATAKYFFYSNIMNFFKTEITLANGEIRKRPLIETNGETGEIVWDKGR |
| | | DFATVRKVLSMPQVNIVKKTEVQTGGFSKESILPKRNSDKLIARKKD |
| | | WDPKKYGGFDSPTVAYSVLVVAKVEKGKSKKLKSVKELLGITIMER |
| | | SSFEKNPIDFLEAKGYKEVKKDLIIKLPKYSLFELENGRKRMLASAGE |
| | | LQKGNELALPSKYVNFLYLASHYEKLKGSPEDNEQKQLFVEQHKHY |
| | | LDEIIEQISEFSKRVILADANLDKVLSAYNKHRDKPIREQAENIIHLFTL |
| | | TNLGAPAAFKYFDTTIDRKRYTSTKEVLDATLIHQSITGLYETRIDLS |
| | | QLGGD |
| 103 Cas9 TadAins | 1317 | MDKKYSIGLAIGTNSVGWAVITDEYKVPSKKFKVLGNTDRHSIKKNLI |
| 1029 polypeptide | | GALLFDSGETAEATRLKRTARRRYTRRKNRICYLQEIFSNEMAKVD |
| sequence | | DSFFHRLEESFLVEEDKKHERHPIFGNIVDEVAYHEKYPTIYHLRKK |
| | | LVDSTDKADLRLIYLALAHMIKFRGHFLIEGDLNPDNSDVDKLFIQLV |
| | | QTYNQLFEENPINASGVDAKAILSARLSKSRRLENLIAQLPGEKKNG |
| | | LFGNLIALSLGLTPNFKSNFDLAEDAKLQLSKDTYDDDLDNLLAQIG |
| | | DQYADLFLAAKNLSDAILLSDILRVNTEITKAPLSASMIKRYDEHHQD |
| | | LTLLKALVRQQLPEKYKEIFFDQSKNGYAGYIDGGASQEEFYKFIKPI |
| | | LEKMDGTEELLVKLNREDLLRKQRTFDNGSIPHQIHLGELHAILRRQ |
| | | EDFYPFLKDNREKIEKILTFRIPYYVGPLARGNSRFAWMTRKSEETIT |
| | | PWNFEEWDKGASAQSFIERMTNFDKNLPNEKVLPKHSLLYEYFTV |
| | | YNELTKVKYVTEGMRKPAFLSGEQKKAIVDLLFKTNRKVTVKQLKE |
| | | DYFKKIECFDSVEISGVEDRFNASLGTYHDLLKIIKDKDFLDNEENED |
| | | ILEDIVLTLTLFEDREMIEERLKTYAHLFDDKVMKQLKRRRYTGWGR |
| | | LSRKLINGIRDKQSGKTILDFLKSDGFANRNFMQLIHDDSLTFKEDIQ |
| | | KAQVSGQGDSLHEHIANLAGSPAIKKGILQTVKVVDELVKVMGRHK |
| | | PENIVIEMARENQTTQKGQKNSRERMKRIEEGIKELGSQILKEHPVE |
| | | NTQLQNEKLYLYYLQNGRDMYVDQELDINRLSDYDVDHIVPQSFLK |
| | | DDSIDNKVLTRSDKNRGKSDNVPSEEVVKKMKNYWRQLLNAKLITQ |
| | | RKFDNLTKAERGGLSELDKAGFIKRQLVETRQITKHVAQILDSRMNT |
| | | KYDENDKLIREVKVITLKSKLVSDFRKDFQFYKVREINNYHHAHDAY |
| | | LNAVVGTALIKKYPKLESEFVYGDYKVYDVRKMIAKSEQEIGSSGSE |
| | | TPGTSESATPESSGSEVEFSHEYWMRHALTLAKRARDEREVPVGA |
| | | VLVLNNRVIGEGWNRAIGLHDPTAHAEIMALRQGGLVMQNYRLIDA |
| | | TLYVTFEPCVMCAGAMIHSRIGRWFGVRNAKTGAAGSLMDVLHYP |
| | | GMNHRVEITEGILADECAALLCYFFRMPRQVFNAQKKAQSSTDGKA |
| | | TAKYFFYSNIMNFFKTEITLANGEIRKRPLIETNGETGEIVWDKGRDF |
| | | ATVRKVLSMPQVNIVKKTEVQTGGFSKESILPKRNSDKLIARKKDW |
| | | DPKKYGGFDSPTVAYSVLWAKVEKGKSKKLKSVKELLGITIMERSS |
| | | FEKNPIDFLEAKGYKEVKKDLIIKLPKYSLFELENGRKRMLASAGELQ |
| | | KGNELALPSKYVNFLYLASHYEKLKGSPEDNEQKQLFVEQHKHYLD |
| | | EIIEQISEFSKRVILADANLDKVLSAYNKHRDKPIREQAENIIHLFTLTN |
| | | LGAPAAFKYFDTTIDRKRYTSTKEVLDATLIHQSITGLYETRIDLSQL |
| | | GGD |
| 103 Cas9 TadAins | 1318 | MDKKYSIGLAIGTNSVGWAVITDEYKVPSKKFKVLGNTDRHSIKKNLI |
| 1040 polypeptide | | GALLFDSGETAEATRLKRTARRRYTRRKNRICYLQEIFSNEMAKVD |
| sequence | | DSFFHRLEESFLVEEDKKHERHPIFGNIVDEVAYHEKYPTIYHLRKK |
| | | LVDSTDKADLRLIYLALAHMIKFRGHFLIEGDLNPDNSDVDKLFIQLV |
| | | QTYNQLFEENPINASGVDAKAILSARLSKSRRLENLIAQLPGEKKNG |
| | | LFGNLIALSLGLTPNFKSNFDLAEDAKLQLSKDTYDDDLDNLLAQIG |
| | | DQYADLFLAAKNLSDAILLSDILRVNTEITKAPLSASMIKRYDEHHQD |
| | | LTLLKALVRQQLPEKYKEIFFDQSKNGYAGYIDGGASQEEFYKFIKPI |
| | | LEKMDGTEELLVKLNREDLLRKQRTFDNGSIPHQIHLGELHAILRRQ |
| | | EDFYPFLKDNREKIEKILTFRIPYYVGPLARGNSRFAWMTRKSEETIT |
| | | PWNFEEWDKGASAQSFIERMTNFDKNLPNEKVLPKHSLLYEYFTV |
| | | YNELTKVKYVTEGMRKPAFLSGEQKKAIVDLLFKTNRKVTVKQLKE |
| | | DYFKKIECFDSVEISGVEDRFNASLGTYHDLLKIIKDKDFLDNEENED |
| | | ILEDIVLTLTLFEDREMIEERLKTYAHLFDDKVMKQLKRRRYTGWGR |
| | | LSRKLINGIRDKQSGKTILDFLKSDGFANRNFMQLIHDDSLTFKEDIQ |
| | | KAQVSGQGDSLHEHIANLAGSPAIKKGILQTVKVVDELVKVMGRHK |
| | | PENIVIEMARENQTTQKGQKNSRERMKRIEEGIKELGSQILKEHPVE |
| | | NTQLQNEKLYLYYLQNGRDMYVDQELDINRLSDYDVDHIVPQSFLK |
| | | DDSIDNKVLTRSDKNRGKSDNVPSEEVVKKMKNYWRQLLNAKLITQ |
| | | RKFDNLTKAERGGLSELDKAGFIKRQLVETRQITKHVAQILDSRMNT |
| | | KYDENDKLIREVKVITLKSKLVSDFRKDFQFYKVREINNYHHAHDAY |
| | | LNAWGTALIKKYPKLESEFVYGDYKVYDVRKMIAKSEQEIGKATAK |
| | | YFFYSGSSGSETPGTSESATPESSGSEVEFSHEYWMRHALTLAKR |
| | | ARDEREVPVGAVLVLNNRVIGEGWNRAIGLHDPTAHAEIMALRQG |
| | | GLVMQNYRLIDATLYVTFEPCVMCAGAMIHSRIGRVVFGVRNAKTG |
| | | AAGSLMDVLHYPGMNHRVEITEGILADECAALLCYFFRMPRQVFNA |
| | | QKKAQSSTDNIMNFFKTEITLANGEIRKRPLIETNGETGEIVWDKGR |
| | | DFATVRKVLSMPQVNIVKKTEVQTGGFSKESILPKRNSDKLIARKKD |
| | | WDPKKYGGFDSPTVAYSVLVVAKVEKGKSKKLKSVKELLGITIMER |
| | | SSFEKNPIDFLEAKGYKEVKKDLIIKLPKYSLFELENGRKRMLASAGE |
| | | LQKGNELALPSKYVNFLYLASHYEKLKGSPEDNEQKQLFVEQHKHY |
| | | LDEIIEQISEFSKRVILADANLDKVLSAYNKHRDKPIREQAENIIHLFTL |
| | | TNLGAPAAFKYFDTTIDRKRYTSTKEVLDATLIHQSITGLYETRIDLS |
| | | QLGGD |
| 105 Cas9 TadAins | 1319 | MDKKYSIGLAIGTNSVGWAVITDEYKVPSKKFKVLGNTDRHSIKKNLI |
| 1068 polypeptide | | GALLFDSGETAEATRLKRTARRRYTRRKNRICYLQEIFSNEMAKVD |
| sequence | | DSFFHRLEESFLVEEDKKHERHPIFGNIVDEVAYHEKYPTIYHLRKK |
| | | LVDSTDKADLRLIYLALAHMIKFRGHFLIEGDLNPDNSDVDKLFIQLV |
| | | QTYNQLFEENPINASGVDAKAILSARLSKSRRLENLIAQLPGEKKNG |
| | | LFGNLIALSLGLTPNFKSNFDLAEDAKLQLSKDTYDDDLDNLLAQIG |
| | | DQYADLFLAAKNLSDAILLSDILRVNTEITKAPLSASMIKRYDEHHQD |
| | | LTLLKALVRQQLPEKYKEIFFDQSKNGYAGYIDGGASQEEFYKFIKPI |
| | | LEKMDGTEELLVKLNREDLLRKQRTFDNGSIPHQIHLGELHAILRRQ |
| | | EDFYPFLKDNREKIEKILTFRIPYYVGPLARGNSRFAWMTRKSEETIT |
| | | PWNFEEVVDKGASAQSFIERMTNFDKNLPNEKVLPKHSLLYEYFTV |
| | | YNELTKVKYVTEGMRKPAFLSGEQKKAIVDLLFKTNRKVTVKQLKE |
| | | DYFKKIECFDSVEISGVEDRFNASLGTYHDLLKIIKDKDFLDNEENED |
| | | ILEDIVLTLTLFEDREMIEERLKTYAHLFDDKVMKQLKRRRYTGWGR |
| | | LSRKLINGIRDKQSGKTILDFLKSDGFANRNFMQLIHDDSLTFKEDIQ |
| | | KAQVSGQGDSLHEHIANLAGSPAIKKGILQTVKVVDELVKVMGRHK |
| | | PENIVIEMARENQTTQKGQKNSRERMKRIEEGIKELGSQILKEHPVE |
| | | NTQLQNEKLYLYYLQNGRDMYVDQELDINRLSDYDVDHIVPQSFLK |
| | | DDSIDNKVLTRSDKNRGKSDNVPSEEVVKKMKNYWRQLLNAKLITQ |
| | | RKFDNLTKAERGGLSELDKAGFIKRQLVETRQITKHVAQILDSRMNT |
| | | KYDENDKLIREVKVITLKSKLVSDFRKDFQFYKVREINNYHHAHDAY |
| | | LNAVVGTALIKKYPKLESEFVYGDYKVYDVRKMIAKSEQEIGKATAK |
| | | YFFYSNIMNFFKTEITLANGEIRKRPLIETNGEGSSGSETPGTSESAT |
| | | PESSGSEVEFSHEYWMRHALTLAKRARDEREVPVGAVLVLNNRVI |
| | | GEGWNRAIGLHDPTAHAEIMALRQGGLVMQNYRLIDATLYVTFEPC |
| | | VMCAGAMIHSRIGRVVFGVRNAKTGAAGSLMDVLHYPGMNHRVEI |
| | | TEGILADECAALLCYFFRMPRQVFNAQKKAQSSTDTGEIVWDKGR |
| | | DFATVRKVLSMPQVNIVKKTEVQTGGFSKESILPKRNSDKLIARKKD |
| | | WDPKKYGGFDSPTVAYSVLVVAKVEKGKSKKLKSVKELLGITIMER |
| | | SSFEKNPIDFLEAKGYKEVKKDLIIKLPKYSLFELENGRKRMLASAGE |
| | | LQKGNELALPSKYVNFLYLASHYEKLKGSPEDNEQKQLFVEQHKHY |
| | | LDEIIEQISEFSKRVILADANLDKVLSAYNKHRDKPIREQAENIIHLFTL |
| | | TNLGAPAAFKYFDTTIDRKRYTSTKEVLDATLIHQSITGLYETRIDLS |
| | | QLGGD |
| 106 Cas9 TadAins | 1320 | MDKKYSIGLAIGTNSVGWAVITDEYKVPSKKFKVLGNTDRHSIKKNLI |
| 1247 polypeptide | | GALLFDSGETAEATRLKRTARRRYTRRKNRICYLQEIFSNEMAKVD |
| sequence | | DSFFHRLEESFLVEEDKKHERHPIFGNIVDEVAYHEKYPTIYHLRKK |
| | | LVDSTDKADLRLIYLALAHMIKFRGHFLIEGDLNPDNSDVDKLFIQLV |
| | | QTYNQLFEENPINASGVDAKAILSARLSKSRRLENLIAQLPGEKKNG |
| | | LFGNLIALSLGLTPNFKSNFDLAEDAKLQLSKDTYDDDLDNLLAQIG |
| | | DQYADLFLAAKNLSDAILLSDILRVNTEITKAPLSASMIKRYDEHHQD |
| | | LTLLKALVRQQLPEKYKEIFFDQSKNGYAGYIDGGASQEEFYKFIKPI |
| | | LEKMDGTEELLVKLNREDLLRKQRTFDNGSIPHQIHLGELHAILRRQ |
| | | EDFYPFLKDNREKIEKILTFRIPYYVGPLARGNSRFAWMTRKSEETIT |
| | | PWNFEEWDKGASAQSFIERMTNFDKNLPNEKVLPKHSLLYEYFTV |
| | | YNELTKVKYVTEGMRKPAFLSGEQKKAIVDLLFKTNRKVTVKQLKE |
| | | DYFKKIECFDSVEISGVEDRFNASLGTYHDLLKIIKDKDFLDNEENED |
| | | ILEDIVLTLTLFEDREMIEERLKTYAHLFDDKVMKQLKRRRYTGWGR |
| | | LSRKLINGIRDKQSGKTILDFLKSDGFANRNFMQLIHDDSLTFKEDIQ |
| | | KAQVSGQGDSLHEHIANLAGSPAIKKGILQTVKVVDELVKVMGRHK |
| | | PENIVIEMARENQTTQKGQKNSRERMKRIEEGIKELGSQILKEHPVE |
| | | NTQLQNEKLYLYYLQNGRDMYVDQELDINRLSDYDVDHIVPQSFLK |
| | | DDSIDNKVLTRSDKNRGKSDNVPSEEVVKKMKNYWRQLLNAKLITQ |
| | | RKFDNLTKAERGGLSELDKAGFIKRQLVETRQITKHVAQILDSRMNT |
| | | KYDENDKLIREVKVITLKSKLVSDFRKDFQFYKVREINNYHHAHDAY |
| | | LNAWGTALIKKYPKLESEFVYGDYKVYDVRKMIAKSEQEIGKATAK |
| | | YFFYSNIMNFFKTEITLANGEIRKRPLIETNGETGEIVWDKGRDFATV |
| | | RKVLSMPQVNIVKKTEVQTGGFSKESILPKRNSDKLIARKKDWDPK |
| | | KYGGFDSPTVAYSVLWAKVEKGKSKKLKSVKELLGITIMERSSFEK |
| | | NPIDFLEAKGYKEVKKDLIIKLPKYSLFELENGRKRMLASAGELQKG |
| | | NELALPSKYVNFLYLASHYEKLKGGSSGSETPGTSESATPESSGSE |
| | | VEFSHEYWMRHALTLAKRARDEREVPVGAVLVLNNRVIGEGWNRA |
| | | IGLHDPTAHAEIMALRQGGLVMQNYRLIDATLYVTFEPCVMCAGAMI |
| | | HSRIGRVVFGVRNAKTGAAGSLMDVLHYPGMNHRVEITEGILADEC |
| | | AALLCYFFRMPRQVFNAQKKAQSSTDSPEDNEQKQLFVEQHKHYL |
| | | DEIIEQISEFSKRVILADANLDKVLSAYNKHRDKPIREQAENIIHLFTLT |
| | | NLGAPAAFKYFDTTIDRKRYTSTKEVLDATLIHQSITGLYETRIDLSQ |
| | | LGGD |
| 107 Cas9 TadAins | 1321 | MDKKYSIGLAIGTNSVGWAVITDEYKVPSKKFKVLGNTDRHSIKKNLI |
| 1054 polypeptide | | GALLFDSGETAEATRLKRTARRRYTRRKNRICYLQEIFSNEMAKVD |
| sequence | | DSFFHRLEESFLVEEDKKHERHPIFGNIVDEVAYHEKYPTIYHLRKK |
| | | LVDSTDKADLRLIYLALAHMIKFRGHFLIEGDLNPDNSDVDKLFIQLV |
| | | QTYNQLFEENPINASGVDAKAILSARLSKSRRLENLIAQLPGEKKNG |
| | | LFGNLIALSLGLTPNFKSNFDLAEDAKLQLSKDTYDDDLDNLLAQIG |
| | | DQYADLFLAAKNLSDAILLSDILRVNTEITKAPLSASMIKRYDEHHQD |
| | | LTLLKALVRQQLPEKYKEIFFDQSKNGYAGYIDGGASQEEFYKFIKPI |
| | | LEKMDGTEELLVKLNREDLLRKQRTFDNGSIPHQIHLGELHAILRRQ |
| | | EDFYPFLKDNREKIEKILTFRIPYYVGPLARGNSRFAWMTRKSEETIT |
| | | PWNFEEVVDKGASAQSFIERMTNFDKNLPNEKVLPKHSLLYEYFTV |
| | | YNELTKVKYVTEGMRKPAFLSGEQKKAIVDLLFKTNRKVTVKQLKE |
| | | DYFKKIECFDSVEISGVEDRFNASLGTYHDLLKIIKDKDFLDNEENED |
| | | ILEDIVLTLTLFEDREMIEERLKTYAHLFDDKVMKQLKRRRYTGWGR |
| | | LSRKLINGIRDKQSGKTILDFLKSDGFANRNFMQLIHDDSLTFKEDIQ |
| | | KAQVSGQGDSLHEHIANLAGSPAIKKGILQTVKVVDELVKVMGRHK |
| | | PENIVIEMARENQTTQKGQKNSRERMKRIEEGIKELGSQILKEHPVE |
| | | NTQLQNEKLYLYYLQNGRDMYVDQELDINRLSDYDVDHIVPQSFLK |
| | | DDSIDNKVLTRSDKNRGKSDNVPSEEVVKKMKNYWRQLLNAKLITQ |
| | | RKFDNLTKAERGGLSELDKAGFIKRQLVETRQITKHVAQILDSRMNT |
| | | KYDENDKLIREVKVITLKSKLVSDFRKDFQFYKVREINNYHHAHDAY |
| | | LNAWGTALIKKYPKLESEFVYGDYKVYDVRKMIAKSEQEIGKATAK |
| | | YFFYSNIMNFFKTEITLANGSSGSETPGTSESATPESSGSEVEFSHE |
| | | YWMRHALTLAKRARDEREVPVGAVLVLNNRVIGEGWNRAIGLHDP |
| | | TAHAEIMALRQGGLVMQNYRLIDATLYVTFEPCVMCAGAMIHSRIG |
| | | RWFGVRNAKTGAAGSLMDVLHYPGMNHRVEITEGILADECAALLC |
| | | YFFRMPRQVFNAQKKAQSSTDGEIRKRPLIETNGETGEIVWDKGRD |
| | | FATVRKVLSMPQVNIVKKTEVQTGGFSKESILPKRNSDKLIARKKDW |
| | | DPKKYGGFDSPTVAYSVLWAKVEKGKSKKLKSVKELLGITIMERSS |
| | | FEKNPIDFLEAKGYKEVKKDLIIKLPKYSLFELENGRKRMLASAGELQ |
| | | KGNELALPSKYVNFLYLASHYEKLKGSPEDNEQKQLFVEQHKHYLD |
| | | EIIEQISEFSKRVILADANLDKVLSAYNKHRDKPIREQAENIIHLFTLTN |
| | | LGAPAAFKYFDTTIDRKRYTSTKEVLDATLIHQSITGLYETRIDLSQL |
| | | GGD |
| 108 Cas9 TadAins | 1322 | MDKKYSIGLAIGTNSVGWAVITDEYKVPSKKFKVLGNTDRHSIKKNLI |
| 1026 polypeptide | | GALLFDSGETAEATRLKRTARRRYTRRKNRICYLQEIFSNEMAKVD |
| sequence | | DSFFHRLEESFLVEEDKKHERHPIFGNIVDEVAYHEKYPTIYHLRKK |
| | | LVDSTDKADLRLIYLALAHMIKFRGHFLIEGDLNPDNSDVDKLFIQLV |
| | | QTYNQLFEENPINASGVDAKAILSARLSKSRRLENLIAQLPGEKKNG |
| | | LFGNLIALSLGLTPNFKSNFDLAEDAKLQLSKDTYDDDLDNLLAQIG |
| | | DQYADLFLAAKNLSDAILLSDILRVNTEITKAPLSASMIKRYDEHHQD |
| | | LTLLKALVRQQLPEKYKEIFFDQSKNGYAGYIDGGASQEEFYKFIKPI |
| | | LEKMDGTEELLVKLNREDLLRKQRTFDNGSIPHQIHLGELHAILRRQ |
| | | EDFYPFLKDNREKIEKILTFRIPYYVGPLARGNSRFAWMTRKSEETIT |
| | | PWNFEEWDKGASAQSFIERMTNFDKNLPNEKVLPKHSLLYEYFTV |
| | | YNELTKVKYVTEGMRKPAFLSGEQKKAIVDLLFKTNRKVTVKQLKE |
| | | DYFKKIECFDSVEISGVEDRFNASLGTYHDLLKIIKDKDFLDNEENED |
| | | ILEDIVLTLTLFEDREMIEERLKTYAHLFDDKVMKQLKRRRYTGWGR |
| | | LSRKLINGIRDKQSGKTILDFLKSDGFANRNFMQLIHDDSLTFKEDIQ |
| | | KAQVSGQGDSLHEHIANLAGSPAIKKGILQTVKVVDELVKVMGRHK |
| | | PENIVIEMARENQTTQKGQKNSRERMKRIEEGIKELGSQILKEHPVE |
| | | NTQLQNEKLYLYYLQNGRDMYVDQELDINRLSDYDVDHIVPQSFLK |
| | | DDSIDNKVLTRSDKNRGKSDNVPSEEVVKKMKNYWRQLLNAKLITQ |
| | | RKFDNLTKAERGGLSELDKAGFIKRQLVETRQITKHVAQILDSRMNT |
| | | KYDENDKLIREVKVITLKSKLVSDFRKDFQFYKVREINNYHHAHDAY |
| | | LNAVVGTALIKKYPKLESEFVYGDYKVYDVRKMIAKSEGSSGSETP |
| | | GTSESATPESSGSEVEFSHEYWMRHALTLAKRARDEREVPVGAVL |
| | | VLNNRVIGEGWNRAIGLHDPTAHAEIMALRQGGLVMQNYRLIDATL |
| | | YVTFEPCVMCAGAMIHSRIGRVVFGVRNAKTGAAGSLMDVLHYPG |
| | | MNHRVEITEGILADECAALLCYFFRMPRQVFNAQKKAQSSTDQEIG |
| | | KATAKYFFYSNIMNFFKTEITLANGEIRKRPLIETNGETGEIVWDKGR |
| | | DFATVRKVLSMPQVNIVKKTEVQTGGFSKESILPKRNSDKLIARKKD |
| | | WDPKKYGGFDSPTVAYSVLVVAKVEKGKSKKLKSVKELLGITIMER |
| | | SSFEKNPIDFLEAKGYKEVKKDLIIKLPKYSLFELENGRKRMLASAGE |
| | | LQKGNELALPSKYVNFLYLASHYEKLKGSPEDNEQKQLFVEQHKHY |
| | | LDEIIEQISEFSKRVILADANLDKVLSAYNKHRDKPIREQAENIIHLFTL |
| | | TNLGAPAAFKYFDTTIDRKRYTSTKEVLDATLIHQSITGLYETRIDLS |
| | | QLGGD |
| 109 Cas9 TadAins | 1323 | MDKKYSIGLAIGTNSVGWAVITDEYKVPSKKFKVLGNTDRHSIKKNLI |
| 768 polypeptide | | GALLFDSGETAEATRLKRTARRRYTRRKNRICYLQEIFSNEMAKVD |
| sequence | | DSFFHRLEESFLVEEDKKHERHPIFGNIVDEVAYHEKYPTIYHLRKK |
| | | LVDSTDKADLRLIYLALAHMIKFRGHFLIEGDLNPDNSDVDKLFIQLV |
| | | QTYNQLFEENPINASGVDAKAILSARLSKSRRLENLIAQLPGEKKNG |
| | | LFGNLIALSLGLTPNFKSNFDLAEDAKLQLSKDTYDDDLDNLLAQIG |
| | | DQYADLFLAAKNLSDAILLSDILRVNTEITKAPLSASMIKRYDEHHQD |
| | | LTLLKALVRQQLPEKYKEIFFDQSKNGYAGYIDGGASQEEFYKFIKPI |
| | | LEKMDGTEELLVKLNREDLLRKQRTFDNGSIPHQIHLGELHAILRRQ |
| | | EDFYPFLKDNREKIEKILTFRIPYYVGPLARGNSRFAWMTRKSEETIT |
| | | PWNFEEWDKGASAQSFIERMTNFDKNLPNEKVLPKHSLLYEYFTV |
| | | YNELTKVKYVTEGMRKPAFLSGEQKKAIVDLLFKTNRKVTVKQLKE |
| | | DYFKKIECFDSVEISGVEDRFNASLGTYHDLLKIIKDKDFLDNEENED |
| | | ILEDIVLTLTLFEDREMIEERLKTYAHLFDDKVMKQLKRRRYTGWGR |
| | | LSRKLINGIRDKQSGKTILDFLKSDGFANRNFMQLIHDDSLTFKEDIQ |
| | | KAQVSGQGDSLHEHIANLAGSPAIKKGILQTVKVVDELVKVMGRHK |
| | | PENMEMARENQGSSGSETPGTSESATPESSGSEVEFSHEYWMR |
| | | HALTLAKRARDEREVPVGAVLVLNNRVIGEGWNRAIGLHDPTAHAE |
| | | IMALRQGGLVMQNYRLIDATLYVTFEPCVMCAGAMIHSRIGRVVFG |
| | | VRNAKTGAAGSLMDVLHYPGMNHRVEITEGILADECAALLCYFFRM |
| | | PRTTQKGQKNSRERMKRIEEGIKELGSQILKEHPVENTQLQNEKLY |
| | | LYYLQNGRDMYVDQELDINRLSDYDVDHIVPQSFLKDDSIDNKVLT |
| | | RSDKNRGKSDNVPSEEWKKMKNYWRQLLNAKLITQRKFDNLTKA |
| | | ERGGLSELDKAGFIKRQLVETRQITKHVAQILDSRMNTKYDENDKLI |
| | | REVKVITLKSKLVSDFRKDFQFYKVREINNYHHAHDAYLNAWGTAL |
| | | IKKYPKLESEFVYGDYKVYDVRKMIAKSEQEIGKATAKYFFYSNIMN |
| | | FFKTEITLANGEIRKRPLIETNGETGEIVWDKGRDFATVRKVLSMPQ |
| | | VNIVKKTEVQTGGFSKESILPKRNSDKLIARKKDWDPKKYGGFDSP |
| | | TVAYSVLWAKVEKGKSKKLKSVKELLGITIMERSSFEKNPIDFLEAK |
| | | GYKEVKKDLIIKLPKYSLFELENGRKRMLASAGELQKGNELALPSKY |
| | | VNFLYLASHYEKLKGSPEDNEQKQLFVEQHKHYLDEIIEQISEFSKR |
| | | VILADANLDKVLSAYNKHRDKPIREQAENIIHLFTLTNLGAPAAFKYF |
| | | DTTIDRKRYTSTKEVLDATLIHQSITGLYETRIDLSQLGGD |
| 110.1 Cas9 | 1324 | MDKKYSIGLAIGTNSVGWAVITDEYKVPSKKFKVLGNTDRHSIKKNLI |
| TadAins 1250 | | GALLFDSGETAEATRLKRTARRRYTRRKNRICYLQEIFSNEMAKVD |
| polypeptide | | DSFFHRLEESFLVEEDKKHERHPIFGNIVDEVAYHEKYPTIYHLRKK |
| sequence | | LVDSTDKADLRLIYLALAHMIKFRGHFLIEGDLNPDNSDVDKLFIQLV |
| | | QTYNQLFEENPINASGVDAKAILSARLSKSRRLENLIAQLPGEKKNG |
| | | LFGNLIALSLGLTPNFKSNFDLAEDAKLQLSKDTYDDDLDNLLAQIG |
| | | DQYADLFLAAKNLSDAILLSDILRVNTEITKAPLSASMIKRYDEHHQD |
| | | LTLLKALVRQQLPEKYKEIFFDQSKNGYAGYIDGGASQEEFYKFIKPI |
| | | LEKMDGTEELLVKLNREDLLRKQRTFDNGSIPHQIHLGELHAILRRQ |
| | | EDFYPFLKDNREKIEKILTFRIPYYVGPLARGNSRFAWMTRKSEETIT |
| | | PWNFEEWDKGASAQSFIERMTNFDKNLPNEKVLPKHSLLYEYFTV |
| | | YNELTKVKYVTEGMRKPAFLSGEQKKAIVDLLFKTNRKVTVKQLKE |
| | | DYFKKIECFDSVEISGVEDRFNASLGTYHDLLKIIKDKDFLDNEENED |
| | | ILEDIVLTLTLFEDREMIEERLKTYAHLFDDKVMKQLKRRRYTGWGR |
| | | LSRKLINGIRDKQSGKTILDFLKSDGFANRNFMQLIHDDSLTFKEDIQ |
| | | KAQVSGQGDSLHEHIANLAGSPAIKKGILQTVKVVDELVKVMGRHK |
| | | PENIVIEMARENQTTQKGQKNSRERMKRIEEGIKELGSQILKEHPVE |
| | | NTQLQNEKLYLYYLQNGRDMYVDQELDINRLSDYDVDHIVPQSFLK |
| | | DDSIDNKVLTRSDKNRGKSDNVPSEEVVKKMKNYWRQLLNAKLITQ |
| | | RKFDNLTKAERGGLSELDKAGFIKRQLVETRQITKHVAQILDSRMNT |
| | | KYDENDKLIREVKVITLKSKLVSDFRKDFQFYKVREINNYHHAHDAY |
| | | LNAVVGTALIKKYPKLESEFVYGDYKVYDVRKMIAKSEQEIGKATAK |
| | | YFFYSNIMNFFKTEITLANGEIRKRPLIETNGETGEIVWDKGRDFATV |
| | | RKVLSMPQVNIVKKTEVQTGGFSKESILPKRNSDKLIARKKDWDPK |
| | | KYGGFDSPTVAYSVLWAKVEKGKSKKLKSVKELLGITIMERSSFEK |
| | | NPIDFLEAKGYKEVKKDLIIKLPKYSLFELENGRKRMLASAGELQKG |
| | | NELALPSKYVNFLYLASHYEKLKGSPGSSGSETPGTSESATPESSG |
| | | SEVEFSHEYWMRHALTLAKRARDEREVPVGAVLVLNNRVIGEGWN |
| | | RAIGLHDPTAHAEIMALRQGGLVMQNYRLIDATLYVTFEPCVMCAG |
| | | AMIHSRIGRVVFGVRNAKTGAAGSLMDVLHYPGMNHRVEITEGILA |
| | | DECAALLCYFFRMPREDNEQKQLFVEQHKHYLDEIIEQISEFSKRVI |
| | | LADANLDKVLSAYNKHRDKPIREQAENIIHLFTLTNLGAPAAFKYFDT |
| | | TIDRKRYTSTKEVLDATLIHQSITGLYETRIDLSQLGGD |
| 110.2 Cas9 | 1325 | MDKKYSIGLAIGTNSVGWAVITDEYKVPSKKFKVLGNTDRHSIKKNLI |
| TadAins 1250 | | GALLFDSGETAEATRLKRTARRRYTRRKNRICYLQEIFSNEMAKVD |
| polypeptide | | DSFFHRLEESFLVEEDKKHERHPIFGNIVDEVAYHEKYPTIYHLRKK |
| sequence | | LVDSTDKADLRLIYLALAHMIKFRGHFLIEGDLNPDNSDVDKLFIQLV |
| | | QTYNQLFEENPINASGVDAKAILSARLSKSRRLENLIAQLPGEKKNG |
| | | LFGNLIALSLGLTPNFKSNFDLAEDAKLQLSKDTYDDDLDNLLAQIG |
| | | DQYADLFLAAKNLSDAILLSDILRVNTEITKAPLSASMIKRYDEHHQD |
| | | LTLLKALVRQQLPEKYKEIFFDQSKNGYAGYIDGGASQEEFYKFIKPI |
| | | LEKMDGTEELLVKLNREDLLRKQRTFDNGSIPHQIHLGELHAILRRQ |
| | | EDFYPFLKDNREKIEKILTFRIPYYVGPLARGNSRFAWMTRKSEETIT |
| | | PWNFEEWDKGASAQSFIERMTNFDKNLPNEKVLPKHSLLYEYFTV |
| | | YNELTKVKYVTEGMRKPAFLSGEQKKAIVDLLFKTNRKVTVKQLKE |
| | | DYFKKIECFDSVEISGVEDRFNASLGTYHDLLKIIKDKDFLDNEENED |
| | | ILEDIVLTLTLFEDREMIEERLKTYAHLFDDKVMKQLKRRRYTGWGR |
| | | LSRKLINGIRDKQSGKTILDFLKSDGFANRNFMQLIHDDSLTFKEDIQ |
| | | KAQVSGQGDSLHEHIANLAGSPAIKKGILQTVKVVDELVKVMGRHK |
| | | PENIVIEMARENQTTQKGQKNSRERMKRIEEGIKELGSQILKEHPVE |
| | | NTQLQNEKLYLYYLQNGRDMYVDQELDINRLSDYDVDHIVPQSFLK |
| | | DDSIDNKVLTRSDKNRGKSDNVPSEEVVKKMKNYWRQLLNAKLITQ |
| | | RKFDNLTKAERGGLSELDKAGFIKRQLVETRQITKHVAQILDSRMNT |
| | | KYDENDKLIREVKVITLKSKLVSDFRKDFQFYKVREINNYHHAHDAY |
| | | LNAWGTALIKKYPKLESEFVYGDYKVYDVRKMIAKSEQEIGKATAK |
| | | YFFYSNIMNFFKTEITLANGEIRKRPLIETNGETGEIVWDKGRDFATV |
| | | RKVLSMPQVNIVKKTEVQTGGFSKESILPKRNSDKLIARKKDWDPK |
| | | KYGGFDSPTVAYSVLWAKVEKGKSKKLKSVKELLGITIMERSSFEK |
| | | NPIDFLEAKGYKEVKKDLIIKLPKYSLFELENGRKRMLASAGELQKG |
| | | NELALPSKYVNFLYLASHYEKLKGSPGSSGSSGSETPGTSESATPE |
| | | SSGSEVEFSHEYWMRHALTLAKRARDEREVPVGAVLVLNNRVIGE |
| | | GWNRAIGLHDPTAHAEIMALRQGGLVMQNYRLIDATLYVTFEPCVM |
| | | CAGAMIHSRIGRVVFGVRNAKTGAAGSLMDVLHYPGMNHRVEITE |
| | | GILADECAALLCYFFRMPREDNEQKQLFVEQHKHYLDEIIEQISEFS |
| | | KRVILADANLDKVLSAYNKHRDKPIREQAENIIHLFTLTNLGAPAAFK |
| | | YFDTTIDRKRYTSTKEVLDATLIHQSITGLYETRIDLSQLGGD |
| 110.3 Cas9 | 1326 | MDKKYSIGLAIGTNSVGWAVITDEYKVPSKKFKVLGNTDRHSIKKNLI |
| TadAins 1250 | | GALLFDSGETAEATRLKRTARRRYTRRKNRICYLQEIFSNEMAKVD |
| polypeptide | | DSFFHRLEESFLVEEDKKHERHPIFGNIVDEVAYHEKYPTIYHLRKK |
| sequence | | LVDSTDKADLRLIYLALAHMIKFRGHFLIEGDLNPDNSDVDKLFIQLV |
| | | QTYNQLFEENPINASGVDAKAILSARLSKSRRLENLIAQLPGEKKNG |
| | | LFGNLIALSLGLTPNFKSNFDLAEDAKLQLSKDTYDDDLDNLLAQIG |
| | | DQYADLFLAAKNLSDAILLSDILRVNTEITKAPLSASMIKRYDEHHQD |
| | | LTLLKALVRQQLPEKYKEIFFDQSKNGYAGYIDGGASQEEFYKFIKPI |
| | | LEKMDGTEELLVKLNREDLLRKQRTFDNGSIPHQIHLGELHAILRRQ |
| | | EDFYPFLKDNREKIEKILTFRIPYYVGPLARGNSRFAWMTRKSEETIT |
| | | PWNFEEVVDKGASAQSFIERMTNFDKNLPNEKVLPKHSLLYEYFTV |
| | | YNELTKVKYVTEGMRKPAFLSGEQKKAIVDLLFKTNRKVTVKQLKE |
| | | DYFKKIECFDSVEISGVEDRFNASLGTYHDLLKIIKDKDFLDNEENED |
| | | ILEDIVLTLTLFEDREMIEERLKTYAHLFDDKVMKQLKRRRYTGWGR |
| | | LSRKLINGIRDKQSGKTILDFLKSDGFANRNFMQLIHDDSLTFKEDIQ |
| | | KAQVSGQGDSLHEHIANLAGSPAIKKGILQTVKVVDELVKVMGRHK |
| | | PENIVIEMARENQTTQKGQKNSRERMKRIEEGIKELGSQILKEHPVE |
| | | NTQLQNEKLYLYYLQNGRDMYVDQELDINRLSDYDVDHIVPQSFLK |
| | | DDSIDNKVLTRSDKNRGKSDNVPSEEVVKKMKNYWRQLLNAKLITQ |
| | | RKFDNLTKAERGGLSELDKAGFIKRQLVETRQITKHVAQILDSRMNT |
| | | KYDENDKLIREVKVITLKSKLVSDFRKDFQFYKVREINNYHHAHDAY |
| | | LNAVVGTALIKKYPKLESEFVYGDYKVYDVRKMIAKSEQEIGKATAK |
| | | YFFYSNIMNFFKTEITLANGEIRKRPLIETNGETGEIVWDKGRDFATV |
| | | RKVLSMPQVNIVKKTEVQTGGFSKESILPKRNSDKLIARKKDWDPK |
| | | KYGGFDSPTVAYSVLWAKVEKGKSKKLKSVKELLGITIMERSSFEK |
| | | NPIDFLEAKGYKEVKKDLIIKLPKYSLFELENGRKRMLASAGELQKG |
| | | NELALPSKYVNFLYLASHYEKLKGSPGSSGSSGSETPGTSESATPE |
| | | SGSSSGSEVEFSHEYWMRHALTLAKRARDEREVPVGAVLVLNNRV |
| | | IGEGWNRAIGLHDPTAHAEIMALRQGGLVMQNYRLIDATLYVTFEP |
| | | CVMCAGAMIHSRIGRVVFGVRNAKTGAAGSLMDVLHYPGMNHRV |
| | | EITEGILADECAALLCYFFRMPREDNEQKQLFVEQHKHYLDEIIEQIS |
| | | EFSKRVILADANLDKVLSAYNKHRDKPIREQAENIIHLFTLTNLGAPA |
| | | AFKYFDTTIDRKRYTSTKEVLDATLIHQSITGLYETRIDLSQLGGD |
| 110.4 Cas9 | 1327 | MDKKYSIGLAIGTNSVGWAVITDEYKVPSKKFKVLGNTDRHSIKKNLI |
| TadAins 1250 | | GALLFDSGETAEATRLKRTARRRYTRRKNRICYLQEIFSNEMAKVD |
| polypeptide | | DSFFHRLEESFLVEEDKKHERHPIFGNIVDEVAYHEKYPTIYHLRKK |
| sequence | | LVDSTDKADLRLIYLALAHMIKFRGHFLIEGDLNPDNSDVDKLFIQLV |
| | | QTYNQLFEENPINASGVDAKAILSARLSKSRRLENLIAQLPGEKKNG |
| | | LFGNLIALSLGLTPNFKSNFDLAEDAKLQLSKDTYDDDLDNLLAQIG |
| | | DQYADLFLAAKNLSDAILLSDILRVNTEITKAPLSASMIKRYDEHHQD |
| | | LTLLKALVRQQLPEKYKEIFFDQSKNGYAGYIDGGASQEEFYKFIKPI |
| | | LEKMDGTEELLVKLNREDLLRKQRTFDNGSIPHQIHLGELHAILRRQ |
| | | EDFYPFLKDNREKIEKILTFRIPYYVGPLARGNSRFAWMTRKSEETIT |
| | | PWNFEEWDKGASAQSFIERMTNFDKNLPNEKVLPKHSLLYEYFTV |
| | | YNELTKVKYVTEGMRKPAFLSGEQKKAIVDLLFKTNRKVTVKQLKE |
| | | DYFKKIECFDSVEISGVEDRFNASLGTYHDLLKIIKDKDFLDNEENED |
| | | ILEDIVLTLTLFEDREMIEERLKTYAHLFDDKVMKQLKRRRYTGWGR |
| | | LSRKLINGIRDKQSGKTILDFLKSDGFANRNFMQLIHDDSLTFKEDIQ |
| | | KAQVSGQGDSLHEHIANLAGSPAIKKGILQTVKVVDELVKVMGRHK |
| | | PENIVIEMARENQTTQKGQKNSRERMKRIEEGIKELGSQILKEHPVE |
| | | NTQLQNEKLYLYYLQNGRDMYVDQELDINRLSDYDVDHIVPQSFLK |
| | | DDSIDNKVLTRSDKNRGKSDNVPSEEVVKKMKNYWRQLLNAKLITQ |
| | | RKFDNLTKAERGGLSELDKAGFIKRQLVETRQITKHVAQILDSRMNT |
| | | KYDENDKLIREVKVITLKSKLVSDFRKDFQFYKVREINNYHHAHDAY |
| | | LNAWGTALIKKYPKLESEFVYGDYKVYDVRKMIAKSEQEIGKATAK |
| | | YFFYSNIMNFFKTEITLANGEIRKRPLIETNGETGEIVWDKGRDFATV |
| | | RKVLSMPQVNIVKKTEVQTGGFSKESILPKRNSDKLIARKKDWDPK |
| | | KYGGFDSPTVAYSVLWAKVEKGKSKKLKSVKELLGITIMERSSFEK |
| | | NPIDFLEAKGYKEVKKDLIIKLPKYSLFELENGRKRMLASAGELQKG |
| | | NELALPSKYVNFLYLASHYEKLKGSPGSSGSSGSETPGTSESATPE |
| | | SGSSSGSEVEFSHEYWMRHALTLAKRARDEREVPVGAVLVLNNRV |
| | | IGEGWNRAIGLHDPTAHAEIMALRQGGLVMQNYRLIDATLYVTFEP |
| | | CVMCAGAMIHSRIGRVVFGVRNAKTGAAGSLMDVLHYPGMNHRV |
| | | EITEGILADECAALLCYFFRMRREDNEQKQLFVEQHKHYLDEIIEQIS |
| | | EFSKRVILADANLDKVLSAYNKHRDKPIREQAENIIHLFTLTNLGAPA |
| | | AFKYFDTTIDRKRYTSTKEVLDATLIHQSITGLYETRIDLSQLGGD |
| 110.5 Cas9 | 1328 | MDKKYSIGLAIGTNSVGWAVITDEYKVPSKKFKVLGNTDRHSIKKNLI |
| TadAins 1249 | | GALLFDSGETAEATRLKRTARRRYTRRKNRICYLQEIFSNEMAKVD |
| polypeptide | | DSFFHRLEESFLVEEDKKHERHPIFGNIVDEVAYHEKYPTIYHLRKK |
| sequence | | LVDSTDKADLRLIYLALAHMIKFRGHFLIEGDLNPDNSDVDKLFIQLV |
| | | QTYNQLFEENPINASGVDAKAILSARLSKSRRLENLIAQLPGEKKNG |
| | | LFGNLIALSLGLTPNFKSNFDLAEDAKLQLSKDTYDDDLDNLLAQIG |
| | | DQYADLFLAAKNLSDAILLSDILRVNTEITKAPLSASMIKRYDEHHQD |
| | | LTLLKALVRQQLPEKYKEIFFDQSKNGYAGYIDGGASQEEFYKFIKPI |
| | | LEKMDGTEELLVKLNREDLLRKQRTFDNGSIPHQIHLGELHAILRRQ |
| | | EDFYPFLKDNREKIEKILTFRIPYYVGPLARGNSRFAWMTRKSEETIT |
| | | PWNFEEVVDKGASAQSFIERMTNFDKNLPNEKVLPKHSLLYEYFTV |
| | | YNELTKVKYVTEGMRKPAFLSGEQKKAIVDLLFKTNRKVTVKQLKE |
| | | DYFKKIECFDSVEISGVEDRFNASLGTYHDLLKIIKDKDFLDNEENED |
| | | ILEDIVLTLTLFEDREMIEERLKTYAHLFDDKVMKQLKRRRYTGWGR |
| | | LSRKLINGIRDKQSGKTILDFLKSDGFANRNFMQLIHDDSLTFKEDIQ |
| | | KAQVSGQGDSLHEHIANLAGSPAIKKGILQTVKVVDELVKVMGRHK |
| | | PENIVIEMARENQTTQKGQKNSRERMKRIEEGIKELGSQILKEHPVE |
| | | NTQLQNEKLYLYYLQNGRDMYVDQELDINRLSDYDVDHIVPQSFLK |
| | | DDSIDNKVLTRSDKNRGKSDNVPSEEVVKKMKNYWRQLLNAKLITQ |
| | | RKFDNLTKAERGGLSELDKAGFIKRQLVETRQITKHVAQILDSRMNT |
| | | KYDENDKLIREVKVITLKSKLVSDFRKDFQFYKVREINNYHHAHDAY |
| | | LNAVVGTALIKKYPKLESEFVYGDYKVYDVRKMIAKSEQEIGKATAK |
| | | YFFYSNIMNFFKTEITLANGEIRKRPLIETNGETGEIVWDKGRDFATV |
| | | RKVLSMPQVNIVKKTEVQTGGFSKESILPKRNSDKLIARKKDWDPK |
| | | KYGGFDSPTVAYSVLWAKVEKGKSKKLKSVKELLGITIMERSSFEK |
| | | NPIDFLEAKGYKEVKKDLIIKLPKYSLFELENGRKRMLASAGELQKG |
| | | NELALPSKYVNFLYLASHYEKLKGSGSSGSSGSETPGTSESATPES |
| | | GSSSGSEVEFSHEYWMRHALTLAKRARDEREVPVGAVLVLNNRVI |
| | | GEGWNRAIGLHDPTAHAEIMALRQGGLVMQNYRLIDATLYVTFEPC |
| | | VMCAGAMIHSRIGRVVFGVRNAKTGAAGSLMDVLHYPGMNHRVEI |
| | | TEGILADECAALLCYFFRMRRPEDNEQKQLFVEQHKHYLDEIIEQIS |
| | | EFSKRVILADANLDKVLSAYNKHRDKPIREQAENIIHLFTLTNLGAPA |
| | | AFKYFDTTIDRKRYTSTKEVLDATLIHQSITGLYETRIDLSQLGGD |
| 110.5 Cas9 | 1329 | MDKKYSIGLAIGTNSVGWAVITDEYKVPSKKFKVLGNTDRHSIKKNLI |
| TadAins delta | | GALLFDSGETAEATRLKRTARRRYTRRKNRICYLQEIFSNEMAKVD |
| 59-66 1250 | | DSFFHRLEESFLVEEDKKHERHPIFGNIVDEVAYHEKYPTIYHLRKK |
| polypeptide | | LVDSTDKADLRLIYLALAHMIKFRGHFLIEGDLNPDNSDVDKLFIQLV |
| sequence | | QTYNQLFEENPINASGVDAKAILSARLSKSRRLENLIAQLPGEKKNG |
| | | LFGNLIALSLGLTPNFKSNFDLAEDAKLQLSKDTYDDDLDNLLAQIG |
| | | DQYADLFLAAKNLSDAILLSDILRVNTEITKAPLSASMIKRYDEHHQD |
| | | LTLLKALVRQQLPEKYKEIFFDQSKNGYAGYIDGGASQEEFYKFIKPI |
| | | LEKMDGTEELLVKLNREDLLRKQRTFDNGSIPHQIHLGELHAILRRQ |
| | | EDFYPFLKDNREKIEKILTFRIPYYVGPLARGNSRFAWMTRKSEETIT |
| | | PWNFEEWDKGASAQSFIERMTNFDKNLPNEKVLPKHSLLYEYFTV |
| | | YNELTKVKYVTEGMRKPAFLSGEQKKAIVDLLFKTNRKVTVKQLKE |
| | | DYFKKIECFDSVEISGVEDRFNASLGTYHDLLKIIKDKDFLDNEENED |
| | | ILEDIVLTLTLFEDREMIEERLKTYAHLFDDKVMKQLKRRRYTGWGR |
| | | LSRKLINGIRDKQSGKTILDFLKSDGFANRNFMQLIHDDSLTFKEDIQ |
| | | KAQVSGQGDSLHEHIANLAGSPAIKKGILQTVKVVDELVKVMGRHK |
| | | PENIVIEMARENQTTQKGQKNSRERMKRIEEGIKELGSQILKEHPVE |
| | | NTQLQNEKLYLYYLQNGRDMYVDQELDINRLSDYDVDHIVPQSFLK |
| | | DDSIDNKVLTRSDKNRGKSDNVPSEEVVKKMKNYWRQLLNAKLITQ |
| | | RKFDNLTKAERGGLSELDKAGFIKRQLVETRQITKHVAQILDSRMNT |
| | | KYDENDKLIREVKVITLKSKLVSDFRKDFQFYKVREINNYHHAHDAY |
| | | LNAWGTALIKKYPKLESEFVYGDYKVYDVRKMIAKSEQEIGKATAK |
| | | YFFYSNIMNFFKTEITLANGEIRKRPLIETNGETGEIVWDKGRDFATV |
| | | RKVLSMPQVNIVKKTEVQTGGFSKESILPKRNSDKLIARKKDWDPK |
| | | KYGGFDSPTVAYSVLVVAKVEKGKSKKLKSVKELLGITIMERSSFEK |
| | | NPIDFLEAKGYKEVKKDLIIKLPKYSLFELENGRKRMLASAGELQKG |
| | | NELALPSKYVNFLYLASHYEKLKGSPGSSGSSGSETPGTSESATPE |
| | | SGSSGSEVEFSHEYWMRHALTLAKRARDEREVPVGAVLVLNNRVI |
| | | GEGWNRAHAEIMALRQGGLVMQNYRLIDATLYVTFEPCVMCAGAM |
| | | IHSRIGRWFGVRNAKTGAAGSLMDVLHYPGMNHRVEITEGILADE |
| | | CAALLCYFFRMPRQVFNAQKKAQSSTDEDNEQKQLFVEQHKHYLD |
| | | EIIEQISEFSKRVILADANLDKVLSAYNKHRDKPIREQAENIIHLFTLTN |
| | | LGAPAAFKYFDTTIDRKRYTSTKEVLDATLIHQSITGLYETRIDLSQL |
| | | GGD |
| 110.6 Cas9 | 1330 | MDKKYSIGLAIGTNSVGWAVITDEYKVPSKKFKVLGNTDRHSIKKNLI |
| TadAins 1251 | | GALLFDSGETAEATRLKRTARRRYTRRKNRICYLQEIFSNEMAKVD |
| polypeptide | | DSFFHRLEESFLVEEDKKHERHPIFGNIVDEVAYHEKYPTIYHLRKK |
| sequence | | LVDSTDKADLRLIYLALAHMIKFRGHFLIEGDLNPDNSDVDKLFIQLV |
| | | QTYNQLFEENPINASGVDAKAILSARLSKSRRLENLIAQLPGEKKNG |
| | | LFGNLIALSLGLTPNFKSNFDLAEDAKLQLSKDTYDDDLDNLLAQIG |
| | | DQYADLFLAAKNLSDAILLSDILRVNTEITKAPLSASMIKRYDEHHQD |
| | | LTLLKALVRQQLPEKYKEIFFDQSKNGYAGYIDGGASQEEFYKFIKPI |
| | | LEKMDGTEELLVKLNREDLLRKQRTFDNGSIPHQIHLGELHAILRRQ |
| | | EDFYPFLKDNREKIEKILTFRIPYYVGPLARGNSRFAWMTRKSEETIT |
| | | PWNFEEVVDKGASAQSFIERMTNFDKNLPNEKVLPKHSLLYEYFTV |
| | | YNELTKVKYVTEGMRKPAFLSGEQKKAIVDLLFKTNRKVTVKQLKE |
| | | DYFKKIECFDSVEISGVEDRFNASLGTYHDLLKIIKDKDFLDNEENED |
| | | ILEDIVLTLTLFEDREMIEERLKTYAHLFDDKVMKQLKRRRYTGWGR |
| | | LSRKLINGIRDKQSGKTILDFLKSDGFANRNFMQLIHDDSLTFKEDIQ |
| | | KAQVSGQGDSLHEHIANLAGSPAIKKGILQTVKVVDELVKVMGRHK |
| | | PENIVIEMARENQTTQKGQKNSRERMKRIEEGIKELGSQILKEHPVE |
| | | NTQLQNEKLYLYYLQNGRDMYVDQELDINRLSDYDVDHIVPQSFLK |
| | | DDSIDNKVLTRSDKNRGKSDNVPSEEVVKKMKNYWRQLLNAKLITQ |
| | | RKFDNLTKAERGGLSELDKAGFIKRQLVETRQITKHVAQILDSRMNT |
| | | KYDENDKLIREVKVITLKSKLVSDFRKDFQFYKVREINNYHHAHDAY |
| | | LNAWGTALIKKYPKLESEFVYGDYKVYDVRKMIAKSEQEIGKATAK |
| | | YFFYSNIMNFFKTEITLANGEIRKRPLIETNGETGEIVWDKGRDFATV |
| | | RKVLSMPQVNIVKKTEVQTGGFSKESILPKRNSDKLIARKKDWDPK |
| | | KYGGFDSPTVAYSVLWAKVEKGKSKKLKSVKELLGITIMERSSFEK |
| | | NPIDFLEAKGYKEVKKDLIIKLPKYSLFELENGRKRMLASAGELQKG |
| | | NELALPSKYVNFLYLASHYEKLKGSPEGSSGSSGSETPGTSESATP |
| | | ESGSSSGSEVEFSHEYWMRHALTLAKRARDEREVPVGAVLVLNNR |
| | | VIGEGWNRAIGLHDPTAHAEIMALRQGGLVMQNYRLIDATLYVTFE |
| | | PCVMCAGAMIHSRIGRVVFGVRNAKTGAAGSLMDVLHYPGMNHR |
| | | VEITEGILADECAALLCYFFRMRRDNEQKQLFVEQHKHYLDEIIEQIS |
| | | EFSKRVILADANLDKVLSAYNKHRDKPIREQAENIIHLFTLTNLGAPA |
| | | AFKYFDTTIDRKRYTSTKEVLDATLIHQSITGLYETRIDLSQLGGD |
| 110.7 Cas9 | 1331 | MDKKYSIGLAIGTNSVGWAVITDEYKVPSKKFKVLGNTDRHSIKKNLI |
| TadAins 1252 | | GALLFDSGETAEATRLKRTARRRYTRRKNRICYLQEIFSNEMAKVD |
| polypeptide | | DSFFHRLEESFLVEEDKKHERHPIFGNIVDEVAYHEKYPTIYHLRKK |
| sequence | | LVDSTDKADLRLIYLALAHMIKFRGHFLIEGDLNPDNSDVDKLFIQLV |
| | | QTYNQLFEENPINASGVDAKAILSARLSKSRRLENLIAQLPGEKKNG |
| | | LFGNLIALSLGLTPNFKSNFDLAEDAKLQLSKDTYDDDLDNLLAQIG |
| | | DQYADLFLAAKNLSDAILLSDILRVNTEITKAPLSASMIKRYDEHHQD |
| | | LTLLKALVRQQLPEKYKEIFFDQSKNGYAGYIDGGASQEEFYKFIKPI |
| | | LEKMDGTEELLVKLNREDLLRKQRTFDNGSIPHQIHLGELHAILRRQ |
| | | EDFYPFLKDNREKIEKILTFRIPYYVGPLARGNSRFAWMTRKSEETIT |
| | | PWNFEEWDKGASAQSFIERMTNFDKNLPNEKVLPKHSLLYEYFTV |
| | | YNELTKVKYVTEGMRKPAFLSGEQKKAIVDLLFKTNRKVTVKQLKE |
| | | DYFKKIECFDSVEISGVEDRFNASLGTYHDLLKIIKDKDFLDNEENED |
| | | ILEDIVLTLTLFEDREMIEERLKTYAHLFDDKVMKQLKRRRYTGWGR |
| | | LSRKLINGIRDKQSGKTILDFLKSDGFANRNFMQLIHDDSLTFKEDIQ |
| | | KAQVSGQGDSLHEHIANLAGSPAIKKGILQTVKVVDELVKVMGRHK |
| | | PENIVIEMARENQTTQKGQKNSRERMKRIEEGIKELGSQILKEHPVE |
| | | NTQLQNEKLYLYYLQNGRDMYVDQELDINRLSDYDVDHIVPQSFLK |
| | | DDSIDNKVLTRSDKNRGKSDNVPSEEVVKKMKNYWRQLLNAKLITQ |
| | | RKFDNLTKAERGGLSELDKAGFIKRQLVETRQITKHVAQILDSRMNT |
| | | KYDENDKLIREVKVITLKSKLVSDFRKDFQFYKVREINNYHHAHDAY |
| | | LNAVVGTALIKKYPKLESEFVYGDYKVYDVRKMIAKSEQEIGKATAK |
| | | YFFYSNIMNFFKTEITLANGEIRKRPLIETNGETGEIVWDKGRDFATV |
| | | RKVLSMPQVNIVKKTEVQTGGFSKESILPKRNSDKLIARKKDWDPK |
| | | KYGGFDSPTVAYSVLWAKVEKGKSKKLKSVKELLGITIMERSSFEK |
| | | NPIDFLEAKGYKEVKKDLIIKLPKYSLFELENGRKRMLASAGELQKG |
| | | NELALPSKYVNFLYLASHYEKLKGSPEDGSSGSSGSETPGTSESAT |
| | | PESGSSSGSEVEFSHEYWMRHALTLAKRARDEREVPVGAVLVLNN |
| | | RVIGEGWNRAIGLHDPTAHAEIMALRQGGLVMQNYRLIDATLYVTF |
| | | EPCVMCAGAMIHSRIGRVVFGVRNAKTGAAGSLMDVLHYPGMNH |
| | | RVEITEGILADECAALLCYFFRMRRNEQKQLFVEQHKHYLDEIIEQIS |
| | | EFSKRVILADANLDKVLSAYNKHRDKPIREQAENIIHLFTLTNLGAPA |
| | | AFKYFDTTIDRKRYTSTKEVLDATLIHQSITGLYETRIDLSQLGGD |
| 110.8 Cas9 | 1332 | MDKKYSIGLAIGTNSVGWAVITDEYKVPSKKFKVLGNTDRHSIKKNLI |
| TadAins delta | | GALLFDSGETAEATRLKRTARRRYTRRKNRICYLQEIFSNEMAKVD |
| 59-66 C-truncate | | DSFFHRLEESFLVEEDKKHERHPIFGNIVDEVAYHEKYPTIYHLRKK |
| 1250 polypeptide | | LVDSTDKADLRLIYLALAHMIKFRGHFLIEGDLNPDNSDVDKLFIQLV |
| sequence | | QTYNQLFEENPINASGVDAKAILSARLSKSRRLENLIAQLPGEKKNG |
| | | LFGNLIALSLGLTPNFKSNFDLAEDAKLQLSKDTYDDDLDNLLAQIG |
| | | DQYADLFLAAKNLSDAILLSDILRVNTEITKAPLSASMIKRYDEHHQD |
| | | LTLLKALVRQQLPEKYKEIFFDQSKNGYAGYIDGGASQEEFYKFIKPI |
| | | LEKMDGTEELLVKLNREDLLRKQRTFDNGSIPHQIHLGELHAILRRQ |
| | | EDFYPFLKDNREKIEKILTFRIPYYVGPLARGNSRFAWMTRKSEETIT |
| | | PWNFEEWDKGASAQSFIERMTNFDKNLPNEKVLPKHSLLYEYFTV |
| | | YNELTKVKYVTEGMRKPAFLSGEQKKAIVDLLFKTNRKVTVKQLKE |
| | | DYFKKIECFDSVEISGVEDRFNASLGTYHDLLKIIKDKDFLDNEENED |
| | | ILEDIVLTLTLFEDREMIEERLKTYAHLFDDKVMKQLKRRRYTGWGR |
| | | LSRKLINGIRDKQSGKTILDFLKSDGFANRNFMQLIHDDSLTFKEDIQ |
| | | KAQVSGQGDSLHEHIANLAGSPAIKKGILQTVKVVDELVKVMGRHK |
| | | PENIVIEMARENQTTQKGQKNSRERMKRIEEGIKELGSQILKEHPVE |
| | | NTQLQNEKLYLYYLQNGRDMYVDQELDINRLSDYDVDHIVPQSFLK |
| | | DDSIDNKVLTRSDKNRGKSDNVPSEEVVKKMKNYWRQLLNAKLITQ |
| | | RKFDNLTKAERGGLSELDKAGFIKRQLVETRQITKHVAQILDSRMNT |
| | | KYDENDKLIREVKVITLKSKLVSDFRKDFQFYKVREINNYHHAHDAY |
| | | LNAWGTALIKKYPKLESEFVYGDYKVYDVRKMIAKSEQEIGKATAK |
| | | YFFYSNIMNFFKTEITLANGEIRKRPLIETNGETGEIVWDKGRDFATV |
| | | RKVLSMPQVNIVKKTEVQTGGFSKESILPKRNSDKLIARKKDWDPK |
| | | KYGGFDSPTVAYSVLWAKVEKGKSKKLKSVKELLGITIMERSSFEK |
| | | NPIDFLEAKGYKEVKKDLIIKLPKYSLFELENGRKRMLASAGELQKG |
| | | NELALPSKYVNFLYLASHYEKLKGSPGSSGSETPGTSESATPESSG |
| | | SEVEFSHEYWMRHALTLAKRARDEREVPVGAVLVLNNRVIGEGWN |
| | | RAHAEIMALRQGGLVMQNYRLIDATLYVTFEPCVMCAGAMIHSRIG |
| | | RWFGVRNAKTGAAGSLMDVLHYPGMNHRVEITEGILADECAALLC |
| | | YFFRMPRQEDNEQKQLFVEQHKHYLDEIIEQISEFSKRVILADANLD |
| | | KVLSAYNKHRDKPIREQAENIIHLFTLTNLGAPAAFKYFDTTIDRKRY |
| | | TSTKEVLDATLIHQSITGLYETRIDLSQLGGD |
| 111.1 Cas9 | 1333 | MDKKYSIGLAIGTNSVGWAVITDEYKVPSKKFKVLGNTDRHSIKKNLI |
| TadAins 997 | | GALLFDSGETAEATRLKRTARRRYTRRKNRICYLQEIFSNEMAKVD |
| polypeptide | | DSFFHRLEESFLVEEDKKHERHPIFGNIVDEVAYHEKYPTIYHLRKK |
| sequence | | LVDSTDKADLRLIYLALAHMIKFRGHFLIEGDLNPDNSDVDKLFIQLV |
| | | QTYNQLFEENPINASGVDAKAILSARLSKSRRLENLIAQLPGEKKNG |
| | | LFGNLIALSLGLTPNFKSNFDLAEDAKLQLSKDTYDDDLDNLLAQIG |
| | | DQYADLFLAAKNLSDAILLSDILRVNTEITKAPLSASMIKRYDEHHQD |
| | | LTLLKALVRQQLPEKYKEIFFDQSKNGYAGYIDGGASQEEFYKFIKPI |
| | | LEKMDGTEELLVKLNREDLLRKQRTFDNGSIPHQIHLGELHAILRRQ |
| | | EDFYPFLKDNREKIEKILTFRIPYYVGPLARGNSRFAWMTRKSEETIT |
| | | PWNFEEWDKGASAQSFIERMTNFDKNLPNEKVLPKHSLLYEYFTV |
| | | YNELTKVKYVTEGMRKPAFLSGEQKKAIVDLLFKTNRKVTVKQLKE |
| | | DYFKKIECFDSVEISGVEDRFNASLGTYHDLLKIIKDKDFLDNEENED |
| | | ILEDIVLTLTLFEDREMIEERLKTYAHLFDDKVMKQLKRRRYTGWGR |
| | | LSRKLINGIRDKQSGKTILDFLKSDGFANRNFMQLIHDDSLTFKEDIQ |
| | | KAQVSGQGDSLHEHIANLAGSPAIKKGILQTVKVVDELVKVMGRHK |
| | | PENIVIEMARENQTTQKGQKNSRERMKRIEEGIKELGSQILKEHPVE |
| | | NTQLQNEKLYLYYLQNGRDMYVDQELDINRLSDYDVDHIVPQSFLK |
| | | DDSIDNKVLTRSDKNRGKSDNVPSEEVVKKMKNYWRQLLNAKLITQ |
| | | RKFDNLTKAERGGLSELDKAGFIKRQLVETRQITKHVAQILDSRMNT |
| | | KYDENDKLIREVKVITLKSKLVSDFRKDFQFYKVREINNYHHAHDAY |
| | | LNAVVGTALSHEYWMRHALTLAKRARDEREVPVGAVLVLNNRVIG |
| | | EGWNRAIGLHDPTAHAEIMALRQGGLVMQNYRLIDATLYVTFEPCV |
| | | MCAGAMIHSRIGRWFGVRNAKTGAAGSLMDVLHYPGMNHRVEIT |
| | | EGILADECAALLCYFFRMPRQVFNAQKKAQSSTDGSSGSETPGTS |
| | | ESATPESSGIKKYPKLESEFVYGDYKVYDVRKMIAKSEQEIGKATAK |
| | | YFFYSNIMNFFKTEITLANGEIRKRPLIETNGETGEIVWDKGRDFATV |
| | | RKVLSMPQVNIVKKTEVQTGGFSKESILPKRNSDKLIARKKDWDPK |
| | | KYGGFDSPTVAYSVLWAKVEKGKSKKLKSVKELLGITIMERSSFEK |
| | | NPIDFLEAKGYKEVKKDLIIKLPKYSLFELENGRKRMLASAGELQKG |
| | | NELALPSKYVNFLYLASHYEKLKGSPEDNEQKQLFVEQHKHYLDEII |
| | | EQISEFSKRVILADANLDKVLSAYNKHRDKPIREQAENIIHLFTLTNLG |
| | | APAAFKYFDTTIDRKRYTSTKEVLDATLIHQSITGLYETRIDLSQLGG |
| | | D |
| 111.2 Cas9 | 1334 | MDKKYSIGLAIGTNSVGWAVITDEYKVPSKKFKVLGNTDRHSIKKNLI |
| TadAins 997 | | GALLFDSGETAEATRLKRTARRRYTRRKNRICYLQEIFSNEMAKVD |
| polypeptide | | DSFFHRLEESFLVEEDKKHERHPIFGNIVDEVAYHEKYPTIYHLRKK |
| sequence | | LVDSTDKADLRLIYLALAHMIKFRGHFLIEGDLNPDNSDVDKLFIQLV |
| | | QTYNQLFEENPINASGVDAKAILSARLSKSRRLENLIAQLPGEKKNG |
| | | LFGNLIALSLGLTPNFKSNFDLAEDAKLQLSKDTYDDDLDNLLAQIG |
| | | DQYADLFLAAKNLSDAILLSDILRVNTEITKAPLSASMIKRYDEHHQD |
| | | LTLLKALVRQQLPEKYKEIFFDQSKNGYAGYIDGGASQEEFYKFIKPI |
| | | LEKMDGTEELLVKLNREDLLRKQRTFDNGSIPHQIHLGELHAILRRQ |
| | | EDFYPFLKDNREKIEKILTFRIPYYVGPLARGNSRFAWMTRKSEETIT |
| | | PWNFEEWDKGASAQSFIERMTNFDKNLPNEKVLPKHSLLYEYFTV |
| | | YNELTKVKYVTEGMRKPAFLSGEQKKAIVDLLFKTNRKVTVKQLKE |
| | | DYFKKIECFDSVEISGVEDRFNASLGTYHDLLKIIKDKDFLDNEENED |
| | | ILEDIVLTLTLFEDREMIEERLKTYAHLFDDKVMKQLKRRRYTGWGR |
| | | LSRKLINGIRDKQSGKTILDFLKSDGFANRNFMQLIHDDSLTFKEDIQ |
| | | KAQVSGQGDSLHEHIANLAGSPAIKKGILQTVKVVDELVKVMGRHK |
| | | PENIVIEMARENQTTQKGQKNSRERMKRIEEGIKELGSQILKEHPVE |
| | | NTQLQNEKLYLYYLQNGRDMYVDQELDINRLSDYDVDHIVPQSFLK |
| | | DDSIDNKVLTRSDKNRGKSDNVPSEEVVKKMKNYWRQLLNAKLITQ |
| | | RKFDNLTKAERGGLSELDKAGFIKRQLVETRQITKHVAQILDSRMNT |
| | | KYDENDKLIREVKVITLKSKLVSDFRKDFQFYKVREINNYHHAHDAY |
| | | LNAWGTALSHEYWMRHALTLAKRARDEREVPVGAVLVLNNRVIG |
| | | EGWNRAIGLHDPTAHAEIMALRQGGLVMQNYRLIDATLYVTFEPCV |
| | | MCAGAMIHSRIGRWFGVRNAKTGAAGSLMDVLHYPGMNHRVEIT |
| | | EGILADECAALLCYFFRMPRQVFNAQKKAQSSTDGSSGSSGSETP |
| | | GTSESATPESSGGSSIKKYPKLESEFVYGDYKVYDVRKMIAKSEQEI |
| | | GKATAKYFFYSNIMNFFKTEITLANGEIRKRPLIETNGETGEIVWDKG |
| | | RDFATVRKVLSMPQVNIVKKTEVQTGGFSKESILPKRNSDKLIARKK |
| | | DWDPKKYGGFDSPTVAYSVLVVAKVEKGKSKKLKSVKELLGITIME |
| | | RSSFEKNPIDFLEAKGYKEVKKDLIIKLPKYSLFELENGRKRMLASA |
| | | GELQKGNELALPSKYVNFLYLASHYEKLKGSPEDNEQKQLFVEQH |
| | | KHYLDEIIEQISEFSKRVILADANLDKVLSAYNKHRDKPIREQAENIIH |
| | | LFTLTNLGAPAAFKYFDTTIDRKRYTSTKEVLDATLIHQSITGLYETRI |
| | | DLSQLGGD |
| 112 delta HNH | 1335 | MDKKYSIGLAIGTNSVGWAVITDEYKVPSKKFKVLGNTDRHSIKKNLI |
| TadA polypeptide | | GALLFDSGETAEATRLKRTARRRYTRRKNRICYLQEIFSNEMAKVD |
| sequence | | DSFFHRLEESFLVEEDKKHERHPIFGNIVDEVAYHEKYPTIYHLRKK |
| | | LVDSTDKADLRLIYLALAHMIKFRGHFLIEGDLNPDNSDVDKLFIQLV |
| | | QTYNQLFEENPINASGVDAKAILSARLSKSRRLENLIAQLPGEKKNG |
| | | LFGNLIALSLGLTPNFKSNFDLAEDAKLQLSKDTYDDDLDNLLAQIG |
| | | DQYADLFLAAKNLSDAILLSDILRVNTEITKAPLSASMIKRYDEHHQD |
| | | LTLLKALVRQQLPEKYKEIFFDQSKNGYAGYIDGGASQEEFYKFIKPI |
| | | LEKMDGTEELLVKLNREDLLRKQRTFDNGSIPHQIHLGELHAILRRQ |
| | | EDFYPFLKDNREKIEKILTFRIPYYVGPLARGNSRFAWMTRKSEETIT |
| | | PWNFEEWDKGASAQSFIERMTNFDKNLPNEKVLPKHSLLYEYFTV |
| | | YNELTKVKYVTEGMRKPAFLSGEQKKAIVDLLFKTNRKVTVKQLKE |
| | | DYFKKIECFDSVEISGVEDRFNASLGTYHDLLKIIKDKDFLDNEENED |
| | | ILEDIVLTLTLFEDREMIEERLKTYAHLFDDKVMKQLKRRRYTGWGR |
| | | LSRKLINGIRDKQSGKTILDFLKSDGFANRNFMQLIHDDSLTFKEDIQ |
| | | KAQVSGQGDSLHEHIANLAGSPAIKKGILQTVKVVDELVKVMGRHK |
| | | PENIVIEMARENQTTQKGQKNSRERMKRIEEGIKELGSEVEFSHEY |
| | | WMRHALTLAKRARDEREVPVGAVLVLNNRVIGEGWNRAIGLHDPT |
| | | AHAEIMALRQGGLVMQNYRLIDATLYVTFEPCVMCAGAMIHSRIGR |
| | | VVFGVRNAKTGAAGSLMDVLHYPGMNHRVEITEGILADECAALLCY |
| | | FFRMPRQVFNAQKKAQSSTDGGLSELDKAGFIKRQLVETRQITKHV |
| | | AQILDSRMNTKYDENDKLIREVKVITLKSKLVSDFRKDFQFYKVREIN |
| | | NYHHAHDAYLNAVVGTALIKKYPKLESEFVYGDYKVYDVRKMIAKS |
| | | EQEIGKATAKYFFYSNIMNFFKTEITLANGEIRKRPLIETNGETGEIV |
| | | WDKGRDFATVRKVLSMPQVNIVKKTEVQTGGFSKESILPKRNSDKL |
| | | IARKKDWDPKKYGGFDSPTVAYSVLVVAKVEKGKSKKLKSVKELLG |
| | | ITIMERSSFEKNPIDFLEAKGYKEVKKDLIIKLPKYSLFELENGRKRML |
| | | ASAGELQKGNELALPSKYVNFLYLASHYEKLKGSPEDNEQKQLFVE |
| | | QHKHYLDEIIEQISEFSKRVILADANLDKVLSAYNKHRDKPIREQAEN |
| | | IIHLFTLTNLGAPAAFKYFDTTIDRKRYTSTKEVLDATLIHQSITGLYET |
| | | RIDLSQLGGD |
| 113 N-term single | 1336 | MSEVEFSHEYWMRHALTLAKRARDEREVPVGAVLVLNNRVIGEGW |
| TadA helix trunc | | NRAIGLHDPTAHAEIMALRQGGLVMQNYRLIDATLYVTFEPCVMCA |
| 165-end | | GAMIHSRIGRWFGVRNAKTGAAGSLMDVLHYPGMNHRVEITEGIL |
| polypeptide | | ADECAALLCYFFRMPRSGGSSGGSSGSETPGTSESATPESSGGSS |
| sequence | | GGSDKKYSIGLAIGTNSVGWAVITDEYKVPSKKFKVLGNTDRHSIKK |
| | | NLIGALLFDSGETAEATRLKRTARRRYTRRKNRICYLQEIFSNEMAK |
| | | VDDSFFHRLEESFLVEEDKKHERHPIFGNIVDEVAYHEKYPTIYHLR |
| | | KKLVDSTDKADLRLIYLALAHMIKFRGHFLIEGDLNPDNSDVDKLFIQ |
| | | LVQTYNQLFEENPINASGVDAKAILSARLSKSRRLENLIAQLPGEKK |
| | | NGLFGNLIALSLGLTPNFKSNFDLAEDAKLQLSKDTYDDDLDNLLAQ |
| | | IGDQYADLFLAAKNLSDAILLSDILRVNTEITKAPLSASMIKRYDEHH |
| | | QDLTLLKALVRQQLPEKYKEIFFDQSKNGYAGYIDGGASQEEFYKFI |
| | | KPILEKMDGTEELLVKLNREDLLRKQRTFDNGSIPHQIHLGELHAILR |
| | | RQEDFYPFLKDNREKIEKILTFRIPYYVGPLARGNSRFAWMTRKSEE |
| | | TITPWNFEEVVDKGASAQSFIERMTNFDKNLPNEKVLPKHSLLYEYF |
| | | TVYNELTKVKYVTEGMRKPAFLSGEQKKAIVDLLFKTNRKVTVKQL |
| | | KEDYFKKIECFDSVEISGVEDRFNASLGTYHDLLKIIKDKDFLDNEEN |
| | | EDILEDIVLTLTLFEDREMIEERLKTYAHLFDDKVMKQLKRRRYTGW |
| | | GRLSRKLINGIRDKQSGKTILDFLKSDGFANRNFMQLIHDDSLTFKE |
| | | DIQKAQVSGQGDSLHEHIANLAGSPAIKKGILQTVKVVDELVKVMGR |
| | | HKPENMEMARENQTTQKGQKNSRERMKRIEEGIKELGSQILKEHP |
| | | VENTQLQNEKLYLYYLQNGRDMYVDQELDINRLSDYDVDHIVPQSF |
| | | LKDDSIDNKVLTRSDKNRGKSDNVPSEEWKKMKNYWRQLLNAKLI |
| | | TQRKFDNLTKAERGGLSELDKAGFIKRQLVETRQITKHVAQILDSRM |
| | | NTKYDENDKLIREVKVITLKSKLVSDFRKDFQFYKVREINNYHHAHD |
| | | AYLNAWGTALIKKYPKLESEFVYGDYKVYDVRKMIAKSEQEIGKAT |
| | | AKYFFYSNIMNFFKTEITLANGEIRKRPLIETNGETGEIVWDKGRDFA |
| | | TVRKVLSMPQVNIVKKTEVQTGGFSKESILPKRNSDKLIARKKDWD |
| | | PKKYGGFDSPTVAYSVLVVAKVEKGKSKKLKSVKELLGITIMERSSF |
| | | EKNPIDFLEAKGYKEVKKDLIIKLPKYSLFELENGRKRMLASAGELQ |
| | | KGNELALPSKYVNFLYLASHYEKLKGSPEDNEQKQLFVEQHKHYLD |
| | | EIIEQISEFSKRVILADANLDKVLSAYNKHRDKPIREQAENIIHLFTLTN |
| | | LGAPAAFKYFDTTIDRKRYTSTKEVLDATLIHQSITGLYETRIDLSQL |
| | | GGD |
| 114 N-term single | 1337 | MSEVEFSHEYWMRHALTLAKRARDEREVPVGAVLVLNNRVIGEGW |
| TadA helix trunc | | NRTAHAEIMALRQGGLVMQNYRLIDATLYVTFEPCVMCAGAMIHSR |
| 165-end delta 59- | | IGRVVFGVRNAKTGAAGSLMDVLHYPGMNHRVEITEGILADECAAL |
| 65 polypeptide | | LCYFFRMPRSGGSSGGSSGSETPGTSESATPESSGGSSGGSDKK |
| sequence | | YSIGLAIGTNSVGWAVITDEYKVPSKKFKVLGNTDRHSIKKNLIGALL |
| | | FDSGETAEATRLKRTARRRYTRRKNRICYLQEIFSNEMAKVDDSFF |
| | | HRLEESFLVEEDKKHERHPIFGNIVDEVAYHEKYPTIYHLRKKLVDS |
| | | TDKADLRLIYLALAHMIKFRGHFLIEGDLNPDNSDVDKLFIQLVQTYN |
| | | QLFEENPINASGVDAKAILSARLSKSRRLENLIAQLPGEKKNGLFGN |
| | | LIALSLGLTPNFKSNFDLAEDAKLQLSKDTYDDDLDNLLAQIGDQYA |
| | | DLFLAAKNLSDAILLSDILRVNTEITKAPLSASMIKRYDEHHQDLTLLK |
| | | ALVRQQLPEKYKEIFFDQSKNGYAGYIDGGASQEEFYKFIKPILEKM |
| | | DGTEELLVKLNREDLLRKQRTFDNGSIPHQIHLGELHAILRRQEDFY |
| | | PFLKDNREKIEKILTFRIPYYVGPLARGNSRFAWMTRKSEETITPWN |
| | | FEEWDKGASAQSFIERMTNFDKNLPNEKVLPKHSLLYEYFTVYNE |
| | | LTKVKYVTEGMRKPAFLSGEQKKAIVDLLFKTNRKVTVKQLKEDYF |
| | | KKIECFDSVEISGVEDRFNASLGTYHDLLKIIKDKDFLDNEENEDILE |
| | | DIVLTLTLFEDREMIEERLKTYAHLFDDKVMKQLKRRRYTGWGRLS |
| | | RKLINGIRDKQSGKTILDFLKSDGFANRNFMQLIHDDSLTFKEDIQKA |
| | | QVSGQGDSLHEHIANLAGSPAIKKGILQTVKVVDELVKVMGRHKPE |
| | | NMEMARENQTTQKGQKNSRERMKRIEEGIKELGSQILKEHPVENT |
| | | QLQNEKLYLYYLQNGRDMYVDQELDINRLSDYDVDHIVPQSFLKDD |
| | | SIDNKVLTRSDKNRGKSDNVPSEEWKKMKNYWRQLLNAKLITQRK |
| | | FDNLTKAERGGLSELDKAGFIKRQLVETRQITKHVAQILDSRMNTKY |
| | | DENDKLIREVKVITLKSKLVSDFRKDFQFYKVREINNYHHAHDAYLN |
| | | AWGTALIKKYPKLESEFVYGDYKVYDVRKMIAKSEQEIGKATAKYF |
| | | FYSNIMNFFKTEITLANGEIRKRPLIETNGETGEIVWDKGRDFATVRK |
| | | VLSMPQVNIVKKTEVQTGGFSKESILPKRNSDKLIARKKDWDPKKY |
| | | GGFDSPTVAYSVLWAKVEKGKSKKLKSVKELLGITIMERSSFEKNP |
| | | IDFLEAKGYKEVKKDLIIKLPKYSLFELENGRKRMLASAGELQKGNE |
| | | LALPSKYVNFLYLASHYEKLKGSPEDNEQKQLFVEQHKHYLDEIIEQ |
| | | ISEFSKRVILADANLDKVLSAYNKHRDKPIREQAENIIHLFTLTNLGAP |
| | | AAFKYFDTTIDRKRYTSTKEVLDATLIHQSITGLYETRIDLSQLGGD |
| 115.1 Cas9 | 1338 | MDKKYSIGLAIGTNSVGWAVITDEYKVPSKKFKVLGNTDRHSIKKNLI |
| TadAins1004 | | GALLFDSGETAEATRLKRTARRRYTRRKNRICYLQEIFSNEMAKVD |
| polypeptide | | DSFFHRLEESFLVEEDKKHERHPIFGNIVDEVAYHEKYPTIYHLRKK |
| sequence | | LVDSTDKADLRLIYLALAHMIKFRGHFLIEGDLNPDNSDVDKLFIQLV |
| | | QTYNQLFEENPINASGVDAKAILSARLSKSRRLENLIAQLPGEKKNG |
| | | LFGNLIALSLGLTPNFKSNFDLAEDAKLQLSKDTYDDDLDNLLAQIG |
| | | DQYADLFLAAKNLSDAILLSDILRVNTEITKAPLSASMIKRYDEHHQD |
| | | LTLLKALVRQQLPEKYKEIFFDQSKNGYAGYIDGGASQEEFYKFIKPI |
| | | LEKMDGTEELLVKLNREDLLRKQRTFDNGSIPHQIHLGELHAILRRQ |
| | | EDFYPFLKDNREKIEKILTFRIPYYVGPLARGNSRFAWMTRKSEETIT |
| | | PWNFEEWDKGASAQSFIERMTNFDKNLPNEKVLPKHSLLYEYFTV |
| | | YNELTKVKYVTEGMRKPAFLSGEQKKAIVDLLFKTNRKVTVKQLKE |
| | | DYFKKIECFDSVEISGVEDRFNASLGTYHDLLKIIKDKDFLDNEENED |
| | | ILEDIVLTLTLFEDREMIEERLKTYAHLFDDKVMKQLKRRRYTGWGR |
| | | LSRKLINGIRDKQSGKTILDFLKSDGFANRNFMQLIHDDSLTFKEDIQ |
| | | KAQVSGQGDSLHEHIANLAGSPAIKKGILQTVKVVDELVKVMGRHK |
| | | PENIVIEMARENQTTQKGQKNSRERMKRIEEGIKELGSQILKEHPVE |
| | | NTQLQNEKLYLYYLQNGRDMYVDQELDINRLSDYDVDHIVPQSFLK |
| | | DDSIDNKVLTRSDKNRGKSDNVPSEEVVKKMKNYWRQLLNAKLITQ |
| | | RKFDNLTKAERGGLSELDKAGFIKRQLVETRQITKHVAQILDSRMNT |
| | | KYDENDKLIREVKVITLKSKLVSDFRKDFQFYKVREINNYHHAHDAY |
| | | LNAVVGTALIKKYPKGSSGSETPGTSESATPESSGSEVEFSHEYW |
| | | MRHALTLAKRARDEREVPVGAVLVLNNRVIGEGWNRAIGLHDPTA |
| | | HAEIMALRQGGLVMQNYRLIDATLYVTFEPCVMCAGAMIHSRIGRV |
| | | VFGVRNAKTGAAGSLMDVLHYPGMNHRVEITEGILADECAALLCYF |
| | | FRMPRQLESEFVYGDYKVYDVRKMIAKSEQEIGKATAKYFFYSNIM |
| | | NFFKTEITLANGEIRKRPLIETNGETGEIVWDKGRDFATVRKVLSMP |
| | | QVNIVKKTEVQTGGFSKESILPKRNSDKLIARKKDWDPKKYGGFDS |
| | | PTVAYSVLVVAKVEKGKSKKLKSVKELLGITIMERSSFEKNPIDFLEA |
| | | KGYKEVKKDLIIKLPKYSLFELENGRKRMLASAGELQKGNELALPSK |
| | | YVNFLYLASHYEKLKGSPEDNEQKQLFVEQHKHYLDEIIEQISEFSK |
| | | RVILADANLDKVLSAYNKHRDKPIREQAENIIHLFTLTNLGAPAAFKY |
| | | FDTTIDRKRYTSTKEVLDATLIHQSITGLYETRIDLSQLGGD |
| 115.2 Cas9 | 1339 | MDKKYSIGLAIGTNSVGWAVITDEYKVPSKKFKVLGNTDRHSIKKNLI |
| TadAins1005 | | GALLFDSGETAEATRLKRTARRRYTRRKNRICYLQEIFSNEMAKVD |
| polypeptide | | DSFFHRLEESFLVEEDKKHERHPIFGNIVDEVAYHEKYPTIYHLRKK |
| sequence | | LVDSTDKADLRLIYLALAHMIKFRGHFLIEGDLNPDNSDVDKLFIQLV |
| | | QTYNQLFEENPINASGVDAKAILSARLSKSRRLENLIAQLPGEKKNG |
| | | LFGNLIALSLGLTPNFKSNFDLAEDAKLQLSKDTYDDDLDNLLAQIG |
| | | DQYADLFLAAKNLSDAILLSDILRVNTEITKAPLSASMIKRYDEHHQD |
| | | LTLLKALVRQQLPEKYKEIFFDQSKNGYAGYIDGGASQEEFYKFIKPI |
| | | LEKMDGTEELLVKLNREDLLRKQRTFDNGSIPHQIHLGELHAILRRQ |
| | | EDFYPFLKDNREKIEKILTFRIPYYVGPLARGNSRFAWMTRKSEETIT |
| | | PWNFEEWDKGASAQSFIERMTNFDKNLPNEKVLPKHSLLYEYFTV |
| | | YNELTKVKYVTEGMRKPAFLSGEQKKAIVDLLFKTNRKVTVKQLKE |
| | | DYFKKIECFDSVEISGVEDRFNASLGTYHDLLKIIKDKDFLDNEENED |
| | | ILEDIVLTLTLFEDREMIEERLKTYAHLFDDKVMKQLKRRRYTGWGR |
| | | LSRKLINGIRDKQSGKTILDFLKSDGFANRNFMQLIHDDSLTFKEDIQ |
| | | KAQVSGQGDSLHEHIANLAGSPAIKKGILQTVKVVDELVKVMGRHK |
| | | PENIVIEMARENQTTQKGQKNSRERMKRIEEGIKELGSQILKEHPVE |
| | | NTQLQNEKLYLYYLQNGRDMYVDQELDINRLSDYDVDHIVPQSFLK |
| | | DDSIDNKVLTRSDKNRGKSDNVPSEEVVKKMKNYWRQLLNAKLITQ |
| | | RKFDNLTKAERGGLSELDKAGFIKRQLVETRQITKHVAQILDSRMNT |
| | | KYDENDKLIREVKVITLKSKLVSDFRKDFQFYKVREINNYHHAHDAY |
| | | LNAVVGTALIKKYPKLGSSGSETPGTSESATPESSGSEVEFSHEYW |
| | | MRHALTLAKRARDEREVPVGAVLVLNNRVIGEGWNRAIGLHDPTA |
| | | HAEIMALRQGGLVMQNYRLIDATLYVTFEPCVMCAGAMIHSRIGRV |
| | | VFGVRNAKTGAAGSLMDVLHYPGMNHRVEITEGILADECAALLCYF |
| | | FRMPRQESEFVYGDYKVYDVRKMIAKSEQEIGKATAKYFFYSNIMN |
| | | FFKTEITLANGEIRKRPLIETNGETGEIVWDKGRDFATVRKVLSMPQ |
| | | VNIVKKTEVQTGGFSKESILPKRNSDKLIARKKDWDPKKYGGFDSP |
| | | TVAYSVLWAKVEKGKSKKLKSVKELLGITIMERSSFEKNPIDFLEAK |
| | | GYKEVKKDLIIKLPKYSLFELENGRKRMLASAGELQKGNELALPSKY |
| | | VNFLYLASHYEKLKGSPEDNEQKQLFVEQHKHYLDEIIEQISEFSKR |
| | | VILADANLDKVLSAYNKHRDKPIREQAENIIHLFTLTNLGAPAAFKYF |
| | | DTTIDRKRYTSTKEVLDATLIHQSITGLYETRIDLSQLGGD |
| 115.3 Cas9 | 1340 | MDKKYSIGLAIGTNSVGWAVITDEYKVPSKKFKVLGNTDRHSIKKNLI |
| TadAins1006 | | GALLFDSGETAEATRLKRTARRRYTRRKNRICYLQEIFSNEMAKVD |
| polypeptide | | DSFFHRLEESFLVEEDKKHERHPIFGNIVDEVAYHEKYPTIYHLRKK |
| sequence | | LVDSTDKADLRLIYLALAHMIKFRGHFLIEGDLNPDNSDVDKLFIQLV |
| | | QTYNQLFEENPINASGVDAKAILSARLSKSRRLENLIAQLPGEKKNG |
| | | LFGNLIALSLGLTPNFKSNFDLAEDAKLQLSKDTYDDDLDNLLAQIG |
| | | DQYADLFLAAKNLSDAILLSDILRVNTEITKAPLSASMIKRYDEHHQD |
| | | LTLLKALVRQQLPEKYKEIFFDQSKNGYAGYIDGGASQEEFYKFIKPI |
| | | LEKMDGTEELLVKLNREDLLRKQRTFDNGSIPHQIHLGELHAILRRQ |
| | | EDFYPFLKDNREKIEKILTFRIPYYVGPLARGNSRFAWMTRKSEETIT |
| | | PWNFEEWDKGASAQSFIERMTNFDKNLPNEKVLPKHSLLYEYFTV |
| | | YNELTKVKYVTEGMRKPAFLSGEQKKAIVDLLFKTNRKVTVKQLKE |
| | | DYFKKIECFDSVEISGVEDRFNASLGTYHDLLKIIKDKDFLDNEENED |
| | | ILEDIVLTLTLFEDREMIEERLKTYAHLFDDKVMKQLKRRRYTGWGR |
| | | LSRKLINGIRDKQSGKTILDFLKSDGFANRNFMQLIHDDSLTFKEDIQ |
| | | KAQVSGQGDSLHEHIANLAGSPAIKKGILQTVKVVDELVKVMGRHK |
| | | PENIVIEMARENQTTQKGQKNSRERMKRIEEGIKELGSQILKEHPVE |
| | | NTQLQNEKLYLYYLQNGRDMYVDQELDINRLSDYDVDHIVPQSFLK |
| | | DDSIDNKVLTRSDKNRGKSDNVPSEEVVKKMKNYWRQLLNAKLITQ |
| | | RKFDNLTKAERGGLSELDKAGFIKRQLVETRQITKHVAQILDSRMNT |
| | | KYDENDKLIREVKVITLKSKLVSDFRKDFQFYKVREINNYHHAHDAY |
| | | LNAVVGTALIKKYPKLEGSSGSETPGTSESATPESSGSEVEFSHEY |
| | | WMRHALTLAKRARDEREVPVGAVLVLNNRVIGEGWNRAIGLHDPT |
| | | AHAEIMALRQGGLVMQNYRLIDATLYVTFEPCVMCAGAMIHSRIGR |
| | | VVFGVRNAKTGAAGSLMDVLHYPGMNHRVEITEGILADECAALLCY |
| | | FFRMPRQSEFVYGDYKVYDVRKMIAKSEQEIGKATAKYFFYSNIMN |
| | | FFKTEITLANGEIRKRPLIETNGETGEIVWDKGRDFATVRKVLSMPQ |
| | | VNIVKKTEVQTGGFSKESILPKRNSDKLIARKKDWDPKKYGGFDSP |
| | | TVAYSVLWAKVEKGKSKKLKSVKELLGITIMERSSFEKNPIDFLEAK |
| | | GYKEVKKDLIIKLPKYSLFELENGRKRMLASAGELQKGNELALPSKY |
| | | VNFLYLASHYEKLKGSPEDNEQKQLFVEQHKHYLDEIIEQISEFSKR |
| | | VILADANLDKVLSAYNKHRDKPIREQAENIIHLFTLTNLGAPAAFKYF |
| | | DTTIDRKRYTSTKEVLDATLIHQSITGLYETRIDLSQLGGD |
| 115.4 Cas9 | 1341 | MDKKYSIGLAIGTNSVGWAVITDEYKVPSKKFKVLGNTDRHSIKKNLI |
| TadAins1007 | | GALLFDSGETAEATRLKRTARRRYTRRKNRICYLQEIFSNEMAKVD |
| polypeptide | | DSFFHRLEESFLVEEDKKHERHPIFGNIVDEVAYHEKYPTIYHLRKK |
| sequence | | LVDSTDKADLRLIYLALAHMIKFRGHFLIEGDLNPDNSDVDKLFIQLV |
| | | QTYNQLFEENPINASGVDAKAILSARLSKSRRLENLIAQLPGEKKNG |
| | | LFGNLIALSLGLTPNFKSNFDLAEDAKLQLSKDTYDDDLDNLLAQIG |
| | | DQYADLFLAAKNLSDAILLSDILRVNTEITKAPLSASMIKRYDEHHQD |
| | | LTLLKALVRQQLPEKYKEIFFDQSKNGYAGYIDGGASQEEFYKFIKPI |
| | | LEKMDGTEELLVKLNREDLLRKQRTFDNGSIPHQIHLGELHAILRRQ |
| | | EDFYPFLKDNREKIEKILTFRIPYYVGPLARGNSRFAWMTRKSEETIT |
| | | PWNFEEVVDKGASAQSFIERMTNFDKNLPNEKVLPKHSLLYEYFTV |
| | | YNELTKVKYVTEGMRKPAFLSGEQKKAIVDLLFKTNRKVTVKQLKE |
| | | DYFKKIECFDSVEISGVEDRFNASLGTYHDLLKIIKDKDFLDNEENED |
| | | ILEDIVLTLTLFEDREMIEERLKTYAHLFDDKVMKQLKRRRYTGWGR |
| | | LSRKLINGIRDKQSGKTILDFLKSDGFANRNFMQLIHDDSLTFKEDIQ |
| | | KAQVSGQGDSLHEHIANLAGSPAIKKGILQTVKVVDELVKVMGRHK |
| | | PENIVIEMARENQTTQKGQKNSRERMKRIEEGIKELGSQILKEHPVE |
| | | NTQLQNEKLYLYYLQNGRDMYVDQELDINRLSDYDVDHIVPQSFLK |
| | | DDSIDNKVLTRSDKNRGKSDNVPSEEVVKKMKNYWRQLLNAKLITQ |
| | | RKFDNLTKAERGGLSELDKAGFIKRQLVETRQITKHVAQILDSRMNT |
| | | KYDENDKLIREVKVITLKSKLVSDFRKDFQFYKVREINNYHHAHDAY |
| | | LNAVVGTALIKKYPKLESGSSGSETPGTSESATPESSGSEVEFSHE |
| | | YWMRHALTLAKRARDEREVPVGAVLVLNNRVIGEGWNRAIGLHDP |
| | | TAHAEIMALRQGGLVMQNYRLIDATLYVTFEPCVMCAGAMIHSRIG |
| | | RVVFGVRNAKTGAAGSLMDVLHYPGMNHRVEITEGILADECAALLC |
| | | YFFRMPRQEFVYGDYKVYDVRKMIAKSEQEIGKATAKYFFYSNIMN |
| | | FFKTEITLANGEIRKRPLIETNGETGEIVWDKGRDFATVRKVLSMPQ |
| | | VNIVKKTEVQTGGFSKESILPKRNSDKLIARKKDWDPKKYGGFDSP |
| | | TVAYSVLWAKVEKGKSKKLKSVKELLGITIMERSSFEKNPIDFLEAK |
| | | GYKEVKKDLIIKLPKYSLFELENGRKRMLASAGELQKGNELALPSKY |
| | | VNFLYLASHYEKLKGSPEDNEQKQLFVEQHKHYLDEIIEQISEFSKR |
| | | VILADANLDKVLSAYNKHRDKPIREQAENIIHLFTLTNLGAPAAFKYF |
| | | DTTIDRKRYTSTKEVLDATLIHQSITGLYETRIDLSQLGGD |
| 116.1 Cas9 | 1342 | MDKKYSIGLAIGTNSVGWAVITDEYKVPSKKFKVLGNTDRHSIKKNLI |
| TadAins C-term | | GALLFDSGETAEATRLKRTARRRYTRRKNRICYLQEIFSNEMAKVD |
| truncate2 792 | | DSFFHRLEESFLVEEDKKHERHPIFGNIVDEVAYHEKYPTIYHLRKK |
| polypeptide | | LVDSTDKADLRLIYLALAHMIKFRGHFLIEGDLNPDNSDVDKLFIQLV |
| sequence | | QTYNQLFEENPINASGVDAKAILSARLSKSRRLENLIAQLPGEKKNG |
| | | LFGNLIALSLGLTPNFKSNFDLAEDAKLQLSKDTYDDDLDNLLAQIG |
| | | DQYADLFLAAKNLSDAILLSDILRVNTEITKAPLSASMIKRYDEHHQD |
| | | LTLLKALVRQQLPEKYKEIFFDQSKNGYAGYIDGGASQEEFYKFIKPI |
| | | LEKMDGTEELLVKLNREDLLRKQRTFDNGSIPHQIHLGELHAILRRQ |
| | | EDFYPFLKDNREKIEKILTFRIPYYVGPLARGNSRFAWMTRKSEETIT |
| | | PWNFEEVVDKGASAQSFIERMTNFDKNLPNEKVLPKHSLLYEYFTV |
| | | YNELTKVKYVTEGMRKPAFLSGEQKKAIVDLLFKTNRKVTVKQLKE |
| | | DYFKKIECFDSVEISGVEDRFNASLGTYHDLLKIIKDKDFLDNEENED |
| | | ILEDIVLTLTLFEDREMIEERLKTYAHLFDDKVMKQLKRRRYTGWGR |
| | | LSRKLINGIRDKQSGKTILDFLKSDGFANRNFMQLIHDDSLTFKEDIQ |
| | | KAQVSGQGDSLHEHIANLAGSPAIKKGILQTVKVVDELVKVMGRHK |
| | | PENMEMARENQTTQKGQKNSRERMKRIEEGIKELGGSSGSETPG |
| | | TSESATPESSGSEVEFSHEYWMRHALTLAKRARDEREVPVGAVLV |
| | | LNNRVIGEGWNRAIGLHDPTAHAEIMALRQGGLVMQNYRLIDATLY |
| | | VTFEPCVMCAGAMIHSRIGRWFGVRNAKTGAAGSLMDVLHYPGM |
| | | NHRVEITEGILADECAALLCYFFRMPRQSQILKEHPVENTQLQNEKL |
| | | YLYYLQNGRDMYVDQELDINRLSDYDVDHIVPQSFLKDDSIDNKVLT |
| | | RSDKNRGKSDNVPSEEVVKKMKNYWRQLLNAKLITQRKFDNLTKA |
| | | ERGGLSELDKAGFIKRQLVETRQITKHVAQILDSRMNTKYDENDKLI |
| | | REVKVITLKSKLVSDFRKDFQFYKVREINNYHHAHDAYLNAWGTAL |
| | | IKKYPKLESEFVYGDYKVYDVRKMIAKSEQEIGKATAKYFFYSNIMN |
| | | FFKTEITLANGEIRKRPLIETNGETGEIVWDKGRDFATVRKVLSMPQ |
| | | VNIVKKTEVQTGGFSKESILPKRNSDKLIARKKDWDPKKYGGFDSP |
| | | TVAYSVLWAKVEKGKSKKLKSVKELLGITIMERSSFEKNPIDFLEAK |
| | | GYKEVKKDLIIKLPKYSLFELENGRKRMLASAGELQKGNELALPSKY |
| | | VNFLYLASHYEKLKGSPEDNEQKQLFVEQHKHYLDEIIEQISEFSKR |
| | | VILADANLDKVLSAYNKHRDKPIREQAENIIHLFTLTNLGAPAAFKYF |
| | | DTTIDRKRYTSTKEVLDATLIHQSITGLYETRIDLSQLGGD |
| 116.2 Cas9 | 1343 | MDKKYSIGLAIGTNSVGWAVITDEYKVPSKKFKVLGNTDRHSIKKNLI |
| TadAins C-term | | GALLFDSGETAEATRLKRTARRRYTRRKNRICYLQEIFSNEMAKVD |
| truncate2 791 | | DSFFHRLEESFLVEEDKKHERHPIFGNIVDEVAYHEKYPTIYHLRKK |
| polypeptide | | LVDSTDKADLRLIYLALAHMIKFRGHFLIEGDLNPDNSDVDKLFIQLV |
| sequence | | QTYNQLFEENPINASGVDAKAILSARLSKSRRLENLIAQLPGEKKNG |
| | | LFGNLIALSLGLTPNFKSNFDLAEDAKLQLSKDTYDDDLDNLLAQIG |
| | | DQYADLFLAAKNLSDAILLSDILRVNTEITKAPLSASMIKRYDEHHQD |
| | | LTLLKALVRQQLPEKYKEIFFDQSKNGYAGYIDGGASQEEFYKFIKPI |
| | | LEKMDGTEELLVKLNREDLLRKQRTFDNGSIPHQIHLGELHAILRRQ |
| | | EDFYPFLKDNREKIEKILTFRIPYYVGPLARGNSRFAWMTRKSEETIT |
| | | PWNFEEWDKGASAQSFIERMTNFDKNLPNEKVLPKHSLLYEYFTV |
| | | YNELTKVKYVTEGMRKPAFLSGEQKKAIVDLLFKTNRKVTVKQLKE |
| | | DYFKKIECFDSVEISGVEDRFNASLGTYHDLLKIIKDKDFLDNEENED |
| | | ILEDIVLTLTLFEDREMIEERLKTYAHLFDDKVMKQLKRRRYTGWGR |
| | | LSRKLINGIRDKQSGKTILDFLKSDGFANRNFMQLIHDDSLTFKEDIQ |
| | | KAQVSGQGDSLHEHIANLAGSPAIKKGILQTVKVVDELVKVMGRHK |
| | | PENMEMARENQTTQKGQKNSRERMKRIEEGIKELGSSGSETPGT |
| | | SESATPESSGSEVEFSHEYWMRHALTLAKRARDEREVPVGAVLVL |
| | | NNRVIGEGWNRAIGLHDPTAHAEIMALRQGGLVMQNYRLIDATLYV |
| | | TFEPCVMCAGAMIHSRIGRVVFGVRNAKTGAAGSLMDVLHYPGMN |
| | | HRVEITEGILADECAALLCYFFRMPRQGSQILKEHPVENTQLQNEKL |
| | | YLYYLQNGRDMYVDQELDINRLSDYDVDHIVPQSFLKDDSIDNKVLT |
| | | RSDKNRGKSDNVPSEEWKKMKNYWRQLLNAKLITQRKFDNLTKA |
| | | ERGGLSELDKAGFIKRQLVETRQITKHVAQILDSRMNTKYDENDKLI |
| | | REVKVITLKSKLVSDFRKDFQFYKVREINNYHHAHDAYLNAVVGTAL |
| | | IKKYPKLESEFVYGDYKVYDVRKMIAKSEQEIGKATAKYFFYSNIMN |
| | | FFKTEITLANGEIRKRPLIETNGETGEIVWDKGRDFATVRKVLSMPQ |
| | | VNIVKKTEVQTGGFSKESILPKRNSDKLIARKKDWDPKKYGGFDSP |
| | | TVAYSVLWAKVEKGKSKKLKSVKELLGITIMERSSFEKNPIDFLEAK |
| | | GYKEVKKDLIIKLPKYSLFELENGRKRMLASAGELQKGNELALPSKY |
| | | VNFLYLASHYEKLKGSPEDNEQKQLFVEQHKHYLDEIIEQISEFSKR |
| | | VILADANLDKVLSAYNKHRDKPIREQAENIIHLFTLTNLGAPAAFKYF |
| | | DTTIDRKRYTSTKEVLDATLIHQSITGLYETRIDLSQLGGD |
| 116.3 Cas9 | 1344 | MDKKYSIGLAIGTNSVGWAVITDEYKVPSKKFKVLGNTDRHSIKKNLI |
| TadAins C-term | | GALLFDSGETAEATRLKRTARRRYTRRKNRICYLQEIFSNEMAKVD |
| truncate2 790 | | DSFFHRLEESFLVEEDKKHERHPIFGNIVDEVAYHEKYPTIYHLRKK |
| polypeptide | | LVDSTDKADLRLIYLALAHMIKFRGHFLIEGDLNPDNSDVDKLFIQLV |
| sequence | | QTYNQLFEENPINASGVDAKAILSARLSKSRRLENLIAQLPGEKKNG |
| | | LFGNLIALSLGLTPNFKSNFDLAEDAKLQLSKDTYDDDLDNLLAQIG |
| | | DQYADLFLAAKNLSDAILLSDILRVNTEITKAPLSASMIKRYDEHHQD |
| | | LTLLKALVRQQLPEKYKEIFFDQSKNGYAGYIDGGASQEEFYKFIKPI |
| | | LEKMDGTEELLVKLNREDLLRKQRTFDNGSIPHQIHLGELHAILRRQ |
| | | EDFYPFLKDNREKIEKILTFRIPYYVGPLARGNSRFAWMTRKSEETIT |
| | | PWNFEEVVDKGASAQSFIERMTNFDKNLPNEKVLPKHSLLYEYFTV |
| | | YNELTKVKYVTEGMRKPAFLSGEQKKAIVDLLFKTNRKVTVKQLKE |
| | | DYFKKIECFDSVEISGVEDRFNASLGTYHDLLKIIKDKDFLDNEENED |
| | | ILEDIVLTLTLFEDREMIEERLKTYAHLFDDKVMKQLKRRRYTGWGR |
| | | LSRKLINGIRDKQSGKTILDFLKSDGFANRNFMQLIHDDSLTFKEDIQ |
| | | KAQVSGQGDSLHEHIANLAGSPAIKKGILQTVKVVDELVKVMGRHK |
| | | PENMEMARENQTTQKGQKNSRERMKRIEEGIKEGSSGSETPGTS |
| | | ESATPESSGSEVEFSHEYWMRHALTLAKRARDEREVPVGAVLVLN |
| | | NRVIGEGWNRAIGLHDPTAHAEIMALRQGGLVMQNYRLIDATLYVT |
| | | FEPCVMCAGAMIHSRIGRVVFGVRNAKTGAAGSLMDVLHYPGMNH |
| | | RVEITEGILADECAALLCYFFRMPRQLGSQILKEHPVENTQLQNEKL |
| | | YLYYLQNGRDMYVDQELDINRLSDYDVDHIVPQSFLKDDSIDNKVLT |
| | | RSDKNRGKSDNVPSEEVVKKMKNYWRQLLNAKLITQRKFDNLTKA |
| | | ERGGLSELDKAGFIKRQLVETRQITKHVAQILDSRMNTKYDENDKLI |
| | | REVKVITLKSKLVSDFRKDFQFYKVREINNYHHAHDAYLNAVVGTAL |
| | | IKKYPKLESEFVYGDYKVYDVRKMIAKSEQEIGKATAKYFFYSNIMN |
| | | FFKTEITLANGEIRKRPLIETNGETGEIVWDKGRDFATVRKVLSMPQ |
| | | VNIVKKTEVQTGGFSKESILPKRNSDKLIARKKDWDPKKYGGFDSP |
| | | TVAYSVLWAKVEKGKSKKLKSVKELLGITIMERSSFEKNPIDFLEAK |
| | | GYKEVKKDLIIKLPKYSLFELENGRKRMLASAGELQKGNELALPSKY |
| | | VNFLYLASHYEKLKGSPEDNEQKQLFVEQHKHYLDEIIEQISEFSKR |
| | | VILADANLDKVLSAYNKHRDKPIREQAENIIHLFTLTNLGAPAAFKYF |
| | | DTTIDRKRYTSTKEVLDATLIHQSITGLYETRIDLSQLGGD |
| 117 Cas9 delta | 1345 | MDKKYSIGLAIGTNSVGWAVITDEYKVPSKKFKVLGNTDRHSIKKNLI |
| 1017-1069 | | GALLFDSGETAEATRLKRTARRRYTRRKNRICYLQEIFSNEMAKVD |
| polypeptide | | DSFFHRLEESFLVEEDKKHERHPIFGNIVDEVAYHEKYPTIYHLRKK |
| sequence | | LVDSTDKADLRLIYLALAHMIKFRGHFLIEGDLNPDNSDVDKLFIQLV |
| | | QTYNQLFEENPINASGVDAKAILSARLSKSRRLENLIAQLPGEKKNG |
| | | LFGNLIALSLGLTPNFKSNFDLAEDAKLQLSKDTYDDDLDNLLAQIG |
| | | DQYADLFLAAKNLSDAILLSDILRVNTEITKAPLSASMIKRYDEHHQD |
| | | LTLLKALVRQQLPEKYKEIFFDQSKNGYAGYIDGGASQEEFYKFIKPI |
| | | LEKMDGTEELLVKLNREDLLRKQRTFDNGSIPHQIHLGELHAILRRQ |
| | | EDFYPFLKDNREKIEKILTFRIPYYVGPLARGNSRFAWMTRKSEETIT |
| | | PWNFEEVVDKGASAQSFIERMTNFDKNLPNEKVLPKHSLLYEYFTV |
| | | YNELTKVKYVTEGMRKPAFLSGEQKKAIVDLLFKTNRKVTVKQLKE |
| | | DYFKKIECFDSVEISGVEDRFNASLGTYHDLLKIIKDKDFLDNEENED |
| | | ILEDIVLTLTLFEDREMIEERLKTYAHLFDDKVMKQLKRRRYTGWGR |
| | | LSRKLINGIRDKQSGKTILDFLKSDGFANRNFMQLIHDDSLTFKEDIQ |
| | | KAQVSGQGDSLHEHIANLAGSPAIKKGILQTVKVVDELVKVMGRHK |
| | | PENIVIEMARENQTTQKGQKNSRERMKRIEEGIKELGSQILKEHPVE |
| | | NTQLQNEKLYLYYLQNGRDMYVDQELDINRLSDYDVDHIVPQSFLK |
| | | DDSIDNKVLTRSDKNRGKSDNVPSEEVVKKMKNYWRQLLNAKLITQ |
| | | RKFDNLTKAERGGLSELDKAGFIKRQLVETRQITKHVAQILDSRMNT |
| | | KYDENDKLIREVKVITLKSKLVSDFRKDFQFYKVREINNYHHAHDAY |
| | | LNAVVGTALIKKYPKLESEFVYGDYKVYSSGSEVEFSHEYWMRHAL |
| | | TLAKRARDEREVPVGAVLVLNNRVIGEGWNRAIGLHDPTAHAEIMA |
| | | LRQGGLVMQNYRLIDATLYVTFEPCVMCAGAMIHSRIGRWFGVRN |
| | | AKTGAAGSLMDVLHYPGMNHRVEITEGILADECAALLCYFFRMPRQ |
| | | VFNAQKKAQSSTDGEIVWDKGRDFATVRKVLSMPQVNIVKKTEVQ |
| | | TGGFSKESILPKRNSDKLIARKKDWDPKKYGGFDSPTVAYSVLVVA |
| | | KVEKGKSKKLKSVKELLGITIMERSSFEKNPIDFLEAKGYKEVKKDLII |
| | | KLPKYSLFELENGRKRMLASAGELQKGNELALPSKYVNFLYLASHY |
| | | EKLKGSPEDNEQKQLFVEQHKHYLDEIIEQISEFSKRVILADANLDKV |
| | | LSAYNKHRDKPIREQAENIIHLFTLTNLGAPAAFKYFDTTIDRKRYTS |
| | | TKEVLDATLIHQSITGLYETRIDLSQLGGD |
| 118 Cas9 TadA- | 1346 | MDKKYSIGLAIGTNSVGWAVITDEYKVPSKKFKVLGNTDRHSIKKNLI |
| CP116ins 1067 | | GALLFDSGETAEATRLKRTARRRYTRRKNRICYLQEIFSNEMAKVD |
| polypeptide | | DSFFHRLEESFLVEEDKKHERHPIFGNIVDEVAYHEKYPTIYHLRKK |
| sequence | | LVDSTDKADLRLIYLALAHMIKFRGHFLIEGDLNPDNSDVDKLFIQLV |
| | | QTYNQLFEENPINASGVDAKAILSARLSKSRRLENLIAQLPGEKKNG |
| | | LFGNLIALSLGLTPNFKSNFDLAEDAKLQLSKDTYDDDLDNLLAQIG |
| | | DQYADLFLAAKNLSDAILLSDILRVNTEITKAPLSASMIKRYDEHHQD |
| | | LTLLKALVRQQLPEKYKEIFFDQSKNGYAGYIDGGASQEEFYKFIKPI |
| | | LEKMDGTEELLVKLNREDLLRKQRTFDNGSIPHQIHLGELHAILRRQ |
| | | EDFYPFLKDNREKIEKILTFRIPYYVGPLARGNSRFAWMTRKSEETIT |
| | | PWNFEEWDKGASAQSFIERMTNFDKNLPNEKVLPKHSLLYEYFTV |
| | | YNELTKVKYVTEGMRKPAFLSGEQKKAIVDLLFKTNRKVTVKQLKE |
| | | DYFKKIECFDSVEISGVEDRFNASLGTYHDLLKIIKDKDFLDNEENED |
| | | ILEDIVLTLTLFEDREMIEERLKTYAHLFDDKVMKQLKRRRYTGWGR |
| | | LSRKLINGIRDKQSGKTILDFLKSDGFANRNFMQLIHDDSLTFKEDIQ |
| | | KAQVSGQGDSLHEHIANLAGSPAIKKGILQTVKVVDELVKVMGRHK |
| | | PENIVIEMARENQTTQKGQKNSRERMKRIEEGIKELGSQILKEHPVE |
| | | NTQLQNEKLYLYYLQNGRDMYVDQELDINRLSDYDVDHIVPQSFLK |
| | | DDSIDNKVLTRSDKNRGKSDNVPSEEVVKKMKNYWRQLLNAKLITQ |
| | | RKFDNLTKAERGGLSELDKAGFIKRQLVETRQITKHVAQILDSRMNT |
| | | KYDENDKLIREVKVITLKSKLVSDFRKDFQFYKVREINNYHHAHDAY |
| | | LNAVVGTALIKKYPKLESEFVYGDYKVYDVRKMIAKSEQEIGKATAK |
| | | YFFYSNIMNFFKTEITLANGEIRKRPLIETNMNHRVEITEGILADECAA |
| | | LLCYFFRMPRQVFNAQKKAQSSTDGSSGSETPGTSESATPESSGS |
| | | EVEFSHEYWMRHALTLAKRARDEREVPVGAVLVLNNRVIGEGWNR |
| | | AIGLHDPTAHAEIMALRQGGLVMQNYRLIDATLYVTFEPCVMCAGA |
| | | MIHSRIGRVVFGVRNAKTGAAGSLMDVLHYPGGETGEIVWDKGRD |
| | | FATVRKVLSMPQVNIVKKTEVQTGGFSKESILPKRNSDKLIARKKDW |
| | | DPKKYGGFDSPTVAYSVLWAKVEKGKSKKLKSVKELLGITIMERSS |
| | | FEKNPIDFLEAKGYKEVKKDLIIKLPKYSLFELENGRKRMLASAGELQ |
| | | KGNELALPSKYVNFLYLASHYEKLKGSPEDNEQKQLFVEQHKHYLD |
| | | EIIEQISEFSKRVILADANLDKVLSAYNKHRDKPIREQAENIIHLFTLTN |
| | | LGAPAAFKYFDTTIDRKRYTSTKEVLDATLIHQSITGLYETRIDLSQL |
| | | GGD |
| 119 Cas9 TadAins | 1347 | MDKKYSIGLAIGTNSVGWAVITDEYKVPSKKFKVLGNTDRHSIKKNLI |
| 701 polypeptide | | GALLFDSGETAEATRLKRTARRRYTRRKNRICYLQEIFSNEMAKVD |
| sequence | | DSFFHRLEESFLVEEDKKHERHPIFGNIVDEVAYHEKYPTIYHLRKK |
| | | LVDSTDKADLRLIYLALAHMIKFRGHFLIEGDLNPDNSDVDKLFIQLV |
| | | QTYNQLFEENPINASGVDAKAILSARLSKSRRLENLIAQLPGEKKNG |
| | | LFGNLIALSLGLTPNFKSNFDLAEDAKLQLSKDTYDDDLDNLLAQIG |
| | | DQYADLFLAAKNLSDAILLSDILRVNTEITKAPLSASMIKRYDEHHQD |
| | | LTLLKALVRQQLPEKYKEIFFDQSKNGYAGYIDGGASQEEFYKFIKPI |
| | | LEKMDGTEELLVKLNREDLLRKQRTFDNGSIPHQIHLGELHAILRRQ |
| | | EDFYPFLKDNREKIEKILTFRIPYYVGPLARGNSRFAWMTRKSEETIT |
| | | PWNFEEWDKGASAQSFIERMTNFDKNLPNEKVLPKHSLLYEYFTV |
| | | YNELTKVKYVTEGMRKPAFLSGEQKKAIVDLLFKTNRKVTVKQLKE |
| | | DYFKKIECFDSVEISGVEDRFNASLGTYHDLLKIIKDKDFLDNEENED |
| | | ILEDIVLTLTLFEDREMIEERLKTYAHLFDDKVMKQLKRRRYTGWGR |
| | | LSRKLINGIRDKQSGKTILDFLKSDGFANRNFMQLIHDDSGSSGSET |
| | | PGTSESATPESSGSEVEFSHEYWMRHALTLAKRARDEREVPVGAV |
| | | LVLNNRVIGEGWNRAIGLHDPTAHAEIMALRQGGLVMQNYRLIDAT |
| | | LYVTFEPCVMCAGAMIHSRIGRVVFGVRNAKTGAAGSLMDVLHYP |
| | | GMNHRVEITEGILADECAALLCYFFRMPRQVFNAQKKAQSSTDLTF |
| | | KEDIQKAQVSGQGDSLHEHIANLAGSPAIKKGILQTVKVVDELVKVM |
| | | GRHKPENIVIEMARENQTTQKGQKNSRERMKRIEEGIKELGSQILKE |
| | | HPVENTQLQNEKLYLYYLQNGRDMYVDQELDINRLSDYDVDHIVPQ |
| | | SFLKDDSIDNKVLTRSDKNRGKSDNVPSEEVVKKMKNYWRQLLNA |
| | | KLITQRKFDNLTKAERGGLSELDKAGFIKRQLVETRQITKHVAQILDS |
| | | RMNTKYDENDKLIREVKVITLKSKLVSDFRKDFQFYKVREINNYHHA |
| | | HDAYLNAVVGTALIKKYPKLESEFVYGDYKVYDVRKMIAKSEQEIGK |
| | | ATAKYFFYSNIMNFFKTEITLANGEIRKRPLIETNGETGEIVWDKGRD |
| | | FATVRKVLSMPQVNIVKKTEVQTGGFSKESILPKRNSDKLIARKKDW |
| | | DPKKYGGFDSPTVAYSVLWAKVEKGKSKKLKSVKELLGITIMERSS |
| | | FEKNPIDFLEAKGYKEVKKDLIIKLPKYSLFELENGRKRMLASAGELQ |
| | | KGNELALPSKYVNFLYLASHYEKLKGSPEDNEQKQLFVEQHKHYLD |
| | | EIIEQISEFSKRVILADANLDKVLSAYNKHRDKPIREQAENIIHLFTLTN |
| | | LGAPAAFKYFDTTIDRKRYTSTKEVLDATLIHQSITGLYETRIDLSQL |
| | | GGD |
| 120 Cas9 | 1348 | MDKKYSIGLAIGTNSVGWAVITDEYKVPSKKFKVLGNTDRHSIKKNLI |
| TadACP136ins | | GALLFDSGETAEATRLKRTARRRYTRRKNRICYLQEIFSNEMAKVD |
| 1248 polypeptide | | DSFFHRLEESFLVEEDKKHERHPIFGNIVDEVAYHEKYPTIYHLRKK |
| sequence | | LVDSTDKADLRLIYLALAHMIKFRGHFLIEGDLNPDNSDVDKLFIQLV |
| | | QTYNQLFEENPINASGVDAKAILSARLSKSRRLENLIAQLPGEKKNG |
| | | LFGNLIALSLGLTPNFKSNFDLAEDAKLQLSKDTYDDDLDNLLAQIG |
| | | DQYADLFLAAKNLSDAILLSDILRVNTEITKAPLSASMIKRYDEHHQD |
| | | LTLLKALVRQQLPEKYKEIFFDQSKNGYAGYIDGGASQEEFYKFIKPI |
| | | LEKMDGTEELLVKLNREDLLRKQRTFDNGSIPHQIHLGELHAILRRQ |
| | | EDFYPFLKDNREKIEKILTFRIPYYVGPLARGNSRFAWMTRKSEETIT |
| | | PWNFEEWDKGASAQSFIERMTNFDKNLPNEKVLPKHSLLYEYFTV |
| | | YNELTKVKYVTEGMRKPAFLSGEQKKAIVDLLFKTNRKVTVKQLKE |
| | | DYFKKIECFDSVEISGVEDRFNASLGTYHDLLKIIKDKDFLDNEENED |
| | | ILEDIVLTLTLFEDREMIEERLKTYAHLFDDKVMKQLKRRRYTGWGR |
| | | LSRKLINGIRDKQSGKTILDFLKSDGFANRNFMQLIHDDSLTFKEDIQ |
| | | KAQVSGQGDSLHEHIANLAGSPAIKKGILQTVKVVDELVKVMGRHK |
| | | PENIVIEMARENQTTQKGQKNSRERMKRIEEGIKELGSQILKEHPVE |
| | | NTQLQNEKLYLYYLQNGRDMYVDQELDINRLSDYDVDHIVPQSFLK |
| | | DDSIDNKVLTRSDKNRGKSDNVPSEEVVKKMKNYWRQLLNAKLITQ |
| | | RKFDNLTKAERGGLSELDKAGFIKRQLVETRQITKHVAQILDSRMNT |
| | | KYDENDKLIREVKVITLKSKLVSDFRKDFQFYKVREINNYHHAHDAY |
| | | LNAWGTALIKKYPKLESEFVYGDYKVYDVRKMIAKSEQEIGKATAK |
| | | YFFYSNIMNFFKTEITLANGEIRKRPLIETNGETGEIVWDKGRDFATV |
| | | RKVLSMPQVNIVKKTEVQTGGFSKESILPKRNSDKLIARKKDWDPK |
| | | KYGGFDSPTVAYSVLWAKVEKGKSKKLKSVKELLGITIMERSSFEK |
| | | NPIDFLEAKGYKEVKKDLIIKLPKYSLFELENGRKRMLASAGELQKG |
| | | NELALPSKYVNFLYLASHYEKLKGSMNHRVEITEGILADECAALLCY |
| | | FFRMPRQVFNAQKKAQSSTDGSSGSETPGTSESATPESSGSEVEF |
| | | SHEYWMRHALTLAKRARDEREVPVGAVLVLNNRVIGEGWNRAIGL |
| | | HDPTAHAEIMALRQGGLVMQNYRLIDATLYVTFEPCVMCAGAMIHS |
| | | RIGRVVFGVRNAKTGAAGSLMDVLHYPGPEDNEQKQLFVEQHKHY |
| | | LDEIIEQISEFSKRVILADANLDKVLSAYNKHRDKPIREQAENIIHLFTL |
| | | TNLGAPAAFKYFDTTIDRKRYTSTKEVLDATLIHQSITGLYETRIDLS |
| | | QLGGD |
| 121 Cas9 | 1349 | MDKKYSIGLAIGTNSVGWAVITDEYKVPSKKFKVLGNTDRHSIKKNLI |
| TadACP136ins | | GALLFDSGETAEATRLKRTARRRYTRRKNRICYLQEIFSNEMAKVD |
| 1052 polypeptide | | DSFFHRLEESFLVEEDKKHERHPIFGNIVDEVAYHEKYPTIYHLRKK |
| sequence | | LVDSTDKADLRLIYLALAHMIKFRGHFLIEGDLNPDNSDVDKLFIQLV |
| | | QTYNQLFEENPINASGVDAKAILSARLSKSRRLENLIAQLPGEKKNG |
| | | LFGNLIALSLGLTPNFKSNFDLAEDAKLQLSKDTYDDDLDNLLAQIG |
| | | DQYADLFLAAKNLSDAILLSDILRVNTEITKAPLSASMIKRYDEHHQD |
| | | LTLLKALVRQQLPEKYKEIFFDQSKNGYAGYIDGGASQEEFYKFIKPI |
| | | LEKMDGTEELLVKLNREDLLRKQRTFDNGSIPHQIHLGELHAILRRQ |
| | | EDFYPFLKDNREKIEKILTFRIPYYVGPLARGNSRFAWMTRKSEETIT |
| | | PWNFEEVVDKGASAQSFIERMTNFDKNLPNEKVLPKHSLLYEYFTV |
| | | YNELTKVKYVTEGMRKPAFLSGEQKKAIVDLLFKTNRKVTVKQLKE |
| | | DYFKKIECFDSVEISGVEDRFNASLGTYHDLLKIIKDKDFLDNEENED |
| | | ILEDIVLTLTLFEDREMIEERLKTYAHLFDDKVMKQLKRRRYTGWGR |
| | | LSRKLINGIRDKQSGKTILDFLKSDGFANRNFMQLIHDDSLTFKEDIQ |
| | | KAQVSGQGDSLHEHIANLAGSPAIKKGILQTVKVVDELVKVMGRHK |
| | | PENIVIEMARENQTTQKGQKNSRERMKRIEEGIKELGSQILKEHPVE |
| | | NTQLQNEKLYLYYLQNGRDMYVDQELDINRLSDYDVDHIVPQSFLK |
| | | DDSIDNKVLTRSDKNRGKSDNVPSEEVVKKMKNYWRQLLNAKLITQ |
| | | RKFDNLTKAERGGLSELDKAGFIKRQLVETRQITKHVAQILDSRMNT |
| | | KYDENDKLIREVKVITLKSKLVSDFRKDFQFYKVREINNYHHAHDAY |
| | | LNAVVGTALIKKYPKLESEFVYGDYKVYDVRKMIAKSEQEIGKATAK |
| | | YFFYSNIMNFFKTEITLAMNHRVEITEGILADECAALLCYFFRMPRQV |
| | | FNAQKKAQSSTDGSSGSETPGTSESATPESSGSEVEFSHEYWMR |
| | | HALTLAKRARDEREVPVGAVLVLNNRVIGEGWNRAIGLHDPTAHAE |
| | | IMALRQGGLVMQNYRLIDATLYVTFEPCVMCAGAMIHSRIGRVVFG |
| | | VRNAKTGAAGSLMDVLHYPGNGEIRKRPLIETNGETGEIVWDKGRD |
| | | FATVRKVLSMPQVNIVKKTEVQTGGFSKESILPKRNSDKLIARKKDW |
| | | DPKKYGGFDSPTVAYSVLWAKVEKGKSKKLKSVKELLGITIMERSS |
| | | FEKNPIDFLEAKGYKEVKKDLIIKLPKYSLFELENGRKRMLASAGELQ |
| | | KGNELALPSKYVNFLYLASHYEKLKGSPEDNEQKQLFVEQHKHYLD |
| | | EIIEQISEFSKRVILADANLDKVLSAYNKHRDKPIREQAENIIHLFTLTN |
| | | LGAPAAFKYFDTTIDRKRYTSTKEVLDATLIHQSITGLYETRIDLSQL |
| | | GGD |
| 122 Cas9 | 1350 | MDKKYSIGLAIGTNSVGWAVITDEYKVPSKKFKVLGNTDRHSIKKNLI |
| TadACP136ins | | GALLFDSGETAEATRLKRTARRRYTRRKNRICYLQEIFSNEMAKVD |
| 1041 polypeptide | | DSFFHRLEESFLVEEDKKHERHPIFGNIVDEVAYHEKYPTIYHLRKK |
| sequence | | LVDSTDKADLRLIYLALAHMIKFRGHFLIEGDLNPDNSDVDKLFIQLV |
| | | QTYNQLFEENPINASGVDAKAILSARLSKSRRLENLIAQLPGEKKNG |
| | | LFGNLIALSLGLTPNFKSNFDLAEDAKLQLSKDTYDDDLDNLLAQIG |
| | | DQYADLFLAAKNLSDAILLSDILRVNTEITKAPLSASMIKRYDEHHQD |
| | | LTLLKALVRQQLPEKYKEIFFDQSKNGYAGYIDGGASQEEFYKFIKPI |
| | | LEKMDGTEELLVKLNREDLLRKQRTFDNGSIPHQIHLGELHAILRRQ |
| | | EDFYPFLKDNREKIEKILTFRIPYYVGPLARGNSRFAWMTRKSEETIT |
| | | PWNFEEWDKGASAQSFIERMTNFDKNLPNEKVLPKHSLLYEYFTV |
| | | YNELTKVKYVTEGMRKPAFLSGEQKKAIVDLLFKTNRKVTVKQLKE |
| | | DYFKKIECFDSVEISGVEDRFNASLGTYHDLLKIIKDKDFLDNEENED |
| | | ILEDIVLTLTLFEDREMIEERLKTYAHLFDDKVMKQLKRRRYTGWGR |
| | | LSRKLINGIRDKQSGKTILDFLKSDGFANRNFMQLIHDDSLTFKEDIQ |
| | | KAQVSGQGDSLHEHIANLAGSPAIKKGILQTVKVVDELVKVMGRHK |
| | | PENIVIEMARENQTTQKGQKNSRERMKRIEEGIKELGSQILKEHPVE |
| | | NTQLQNEKLYLYYLQNGRDMYVDQELDINRLSDYDVDHIVPQSFLK |
| | | DDSIDNKVLTRSDKNRGKSDNVPSEEVVKKMKNYWRQLLNAKLITQ |
| | | RKFDNLTKAERGGLSELDKAGFIKRQLVETRQITKHVAQILDSRMNT |
| | | KYDENDKLIREVKVITLKSKLVSDFRKDFQFYKVREINNYHHAHDAY |
| | | LNAWGTALIKKYPKLESEFVYGDYKVYDVRKMIAKSEQEIGKATAK |
| | | YFFYSMNHRVEITEGILADECAALLCYFFRMPRQVFNAQKKAQSST |
| | | DGSSGSETPGTSESATPESSGSEVEFSHEYWMRHALTLAKRARDE |
| | | REVPVGAVLVLNNRVIGEGWNRAIGLHDPTAHAEIMALRQGGLVM |
| | | QNYRLIDATLYVTFEPCVMCAGAMIHSRIGRVVFGVRNAKTGAAGS |
| | | LMDVLHYPGNIMNFFKTEITLANGEIRKRPLIETNGETGEIVWDKGR |
| | | DFATVRKVLSMPQVNIVKKTEVQTGGFSKESILPKRNSDKLIARKKD |
| | | WDPKKYGGFDSPTVAYSVLVVAKVEKGKSKKLKSVKELLGITIMER |
| | | SSFEKNPIDFLEAKGYKEVKKDLIIKLPKYSLFELENGRKRMLASAGE |
| | | LQKGNELALPSKYVNFLYLASHYEKLKGSPEDNEQKQLFVEQHKHY |
| | | LDEIIEQISEFSKRVILADANLDKVLSAYNKHRDKPIREQAENIIHLFTL |
| | | TNLGAPAAFKYFDTTIDRKRYTSTKEVLDATLIHQSITGLYETRIDLS |
| | | QLGGD |
| 123 Cas9 | 1351 | MDKKYSIGLAIGTNSVGWAVITDEYKVPSKKFKVLGNTDRHSIKKNLI |
| TadACP139ins | | GALLFDSGETAEATRLKRTARRRYTRRKNRICYLQEIFSNEMAKVD |
| 1299 polypeptide | | DSFFHRLEESFLVEEDKKHERHPIFGNIVDEVAYHEKYPTIYHLRKK |
| sequence | | LVDSTDKADLRLIYLALAHMIKFRGHFLIEGDLNPDNSDVDKLFIQLV |
| | | QTYNQLFEENPINASGVDAKAILSARLSKSRRLENLIAQLPGEKKNG |
| | | LFGNLIALSLGLTPNFKSNFDLAEDAKLQLSKDTYDDDLDNLLAQIG |
| | | DQYADLFLAAKNLSDAILLSDILRVNTEITKAPLSASMIKRYDEHHQD |
| | | LTLLKALVRQQLPEKYKEIFFDQSKNGYAGYIDGGASQEEFYKFIKPI |
| | | LEKMDGTEELLVKLNREDLLRKQRTFDNGSIPHQIHLGELHAILRRQ |
| | | EDFYPFLKDNREKIEKILTFRIPYYVGPLARGNSRFAWMTRKSEETIT |
| | | PWNFEEVVDKGASAQSFIERMTNFDKNLPNEKVLPKHSLLYEYFTV |
| | | YNELTKVKYVTEGMRKPAFLSGEQKKAIVDLLFKTNRKVTVKQLKE |
| | | DYFKKIECFDSVEISGVEDRFNASLGTYHDLLKIIKDKDFLDNEENED |
| | | ILEDIVLTLTLFEDREMIEERLKTYAHLFDDKVMKQLKRRRYTGWGR |
| | | LSRKLINGIRDKQSGKTILDFLKSDGFANRNFMQLIHDDSLTFKEDIQ |
| | | KAQVSGQGDSLHEHIANLAGSPAIKKGILQTVKVVDELVKVMGRHK |
| | | PENIVIEMARENQTTQKGQKNSRERMKRIEEGIKELGSQILKEHPVE |
| | | NTQLQNEKLYLYYLQNGRDMYVDQELDINRLSDYDVDHIVPQSFLK |
| | | DDSIDNKVLTRSDKNRGKSDNVPSEEVVKKMKNYWRQLLNAKLITQ |
| | | RKFDNLTKAERGGLSELDKAGFIKRQLVETRQITKHVAQILDSRMNT |
| | | KYDENDKLIREVKVITLKSKLVSDFRKDFQFYKVREINNYHHAHDAY |
| | | LNAWGTALIKKYPKLESEFVYGDYKVYDVRKMIAKSEQEIGKATAK |
| | | YFFYSNIMNFFKTEITLANGEIRKRPLIETNGETGEIVWDKGRDFATV |
| | | RKVLSMPQVNIVKKTEVQTGGFSKESILPKRNSDKLIARKKDWDPK |
| | | KYGGFDSPTVAYSVLWAKVEKGKSKKLKSVKELLGITIMERSSFEK |
| | | NPIDFLEAKGYKEVKKDLIIKLPKYSLFELENGRKRMLASAGELQKG |
| | | NELALPSKYVNFLYLASHYEKLKGSPEDNEQKQLFVEQHKHYLDEII |
| | | EQISEFSKRVILADANLDKVLSAYNKHRMNHRVEITEGILADECAALL |
| | | CYFFRMPRQVFNAQKKAQSSTDGSSGSETPGTSESATPESSGSEV |
| | | EFSHEYWMRHALTLAKRARDEREVPVGAVLVLNNRVIGEGWNRAI |
| | | GLHDPTAHAEIMALRQGGLVMQNYRLIDATLYVTFEPCVMCAGAMI |
| | | HSRIGRWFGVRNAKTGAAGSLMDVLHYPGDKPIREQAENIIHLFTL |
| | | TNLGAPAAFKYFDTTIDRKRYTSTKEVLDATLIHQSITGLYETRIDLS |
| | | QLGGD |
| 124 Cas9 delta | 1352 | MDKKYSIGLAIGTNSVGWAVITDEYKVPSKKFKVLGNTDRHSIKKNLI |
| 792-872 TadAins | | GALLFDSGETAEATRLKRTARRRYTRRKNRICYLQEIFSNEMAKVD |
| polypeptide | | DSFFHRLEESFLVEEDKKHERHPIFGNIVDEVAYHEKYPTIYHLRKK |
| sequence | | LVDSTDKADLRLIYLALAHMIKFRGHFLIEGDLNPDNSDVDKLFIQLV |
| | | QTYNQLFEENPINASGVDAKAILSARLSKSRRLENLIAQLPGEKKNG |
| | | LFGNLIALSLGLTPNFKSNFDLAEDAKLQLSKDTYDDDLDNLLAQIG |
| | | DQYADLFLAAKNLSDAILLSDILRVNTEITKAPLSASMIKRYDEHHQD |
| | | LTLLKALVRQQLPEKYKEIFFDQSKNGYAGYIDGGASQEEFYKFIKPI |
| | | LEKMDGTEELLVKLNREDLLRKQRTFDNGSIPHQIHLGELHAILRRQ |
| | | EDFYPFLKDNREKIEKILTFRIPYYVGPLARGNSRFAWMTRKSEETIT |
| | | PWNFEEWDKGASAQSFIERMTNFDKNLPNEKVLPKHSLLYEYFTV |
| | | YNELTKVKYVTEGMRKPAFLSGEQKKAIVDLLFKTNRKVTVKQLKE |
| | | DYFKKIECFDSVEISGVEDRFNASLGTYHDLLKIIKDKDFLDNEENED |
| | | ILEDIVLTLTLFEDREMIEERLKTYAHLFDDKVMKQLKRRRYTGWGR |
| | | LSRKLINGIRDKQSGKTILDFLKSDGFANRNFMQLIHDDSLTFKEDIQ |
| | | KAQVSGQGDSLHEHIANLAGSPAIKKGILQTVKVVDELVKVMGRHK |
| | | PENIVIEMARENQTTQKGQKNSRERMKRIEEGIKELGSEVEFSHEY |
| | | WMRHALTLAKRARDEREVPVGAVLVLNNRVIGEGWNRAIGLHDPT |
| | | AHAEIMALRQGGLVMQNYRLIDATLYVTFEPCVMCAGAMIHSRIGR |
| | | VVFGVRNAKTGAAGSLMDVLHYPGMNHRVEITEGILADECAALLCY |
| | | FFRMPRQVFNAQKKAQSSTDEEWKKMKNYWRQLLNAKLITQRKF |
| | | DNLTKAERGGLSELDKAGFIKRQLVETRQITKHVAQILDSRMNTKYD |
| | | ENDKLIREVKVITLKSKLVSDFRKDFQFYKVREINNYHHAHDAYLNA |
| | | VVGTALIKKYPKLESEFVYGDYKVYDVRKMIAKSEQEIGKATAKYFF |
| | | YSNIMNFFKTEITLANGEIRKRPLIETNGETGEIVWDKGRDFATVRKV |
| | | LSMPQVNIVKKTEVQTGGFSKESILPKRNSDKLIARKKDWDPKKYG |
| | | GFDSPTVAYSVLWAKVEKGKSKKLKSVKELLGITIMERSSFEKNPI |
| | | DFLEAKGYKEVKKDLIIKLPKYSLFELENGRKRMLASAGELQKGNEL |
| | | ALPSKYVNFLYLASHYEKLKGSPEDNEQKQLFVEQHKHYLDEIIEQI |
| | | SEFSKRVILADANLDKVLSAYNKHRDKPIREQAENIIHLFTLTNLGAP |
| | | AAFKYFDTTIDRKRYTSTKEVLDATLIHQSITGLYETRIDLSQLGGD |
| 125 Cas9 delta | 1353 | MDKKYSIGLAIGTNSVGWAVITDEYKVPSKKFKVLGNTDRHSIKKNLI |
| 792-906 TadAins | | GALLFDSGETAEATRLKRTARRRYTRRKNRICYLQEIFSNEMAKVD |
| polypeptide | | DSFFHRLEESFLVEEDKKHERHPIFGNIVDEVAYHEKYPTIYHLRKK |
| sequence | | LVDSTDKADLRLIYLALAHMIKFRGHFLIEGDLNPDNSDVDKLFIQLV |
| | | QTYNQLFEENPINASGVDAKAILSARLSKSRRLENLIAQLPGEKKNG |
| | | LFGNLIALSLGLTPNFKSNFDLAEDAKLQLSKDTYDDDLDNLLAQIG |
| | | DQYADLFLAAKNLSDAILLSDILRVNTEITKAPLSASMIKRYDEHHQD |
| | | LTLLKALVRQQLPEKYKEIFFDQSKNGYAGYIDGGASQEEFYKFIKPI |
| | | LEKMDGTEELLVKLNREDLLRKQRTFDNGSIPHQIHLGELHAILRRQ |
| | | EDFYPFLKDNREKIEKILTFRIPYYVGPLARGNSRFAWMTRKSEETIT |
| | | PWNFEEVVDKGASAQSFIERMTNFDKNLPNEKVLPKHSLLYEYFTV |
| | | YNELTKVKYVTEGMRKPAFLSGEQKKAIVDLLFKTNRKVTVKQLKE |
| | | DYFKKIECFDSVEISGVEDRFNASLGTYHDLLKIIKDKDFLDNEENED |
| | | ILEDIVLTLTLFEDREMIEERLKTYAHLFDDKVMKQLKRRRYTGWGR |
| | | LSRKLINGIRDKQSGKTILDFLKSDGFANRNFMQLIHDDSLTFKEDIQ |
| | | KAQVSGQGDSLHEHIANLAGSPAIKKGILQTVKVVDELVKVMGRHK |
| | | PENIVIEMARENQTTQKGQKNSRERMKRIEEGIKELGSEVEFSHEY |
| | | WMRHALTLAKRARDEREVPVGAVLVLNNRVIGEGWNRAIGLHDPT |
| | | AHAEIMALRQGGLVMQNYRLIDATLYVTFEPCVMCAGAMIHSRIGR |
| | | WFGVRNAKTGAAGSLMDVLHYPGMNHRVEITEGILADECAALLCY |
| | | FFRMPRQVFNAQKKAQSSTDGLSELDKAGFIKRQLVETRQITKHVA |
| | | QILDSRMNTKYDENDKLIREVKVITLKSKLVSDFRKDFQFYKVREINN |
| | | YHHAHDAYLNAVVGTALIKKYPKLESEFVYGDYKVYDVRKMIAKSE |
| | | QEIGKATAKYFFYSNIMNFFKTEITLANGEIRKRPLIETNGETGEIVW |
| | | DKGRDFATVRKVLSMPQVNIVKKTEVQTGGFSKESILPKRNSDKLIA |
| | | RKKDWDPKKYGGFDSPTVAYSVLVVAKVEKGKSKKLKSVKELLGIT |
| | | IMERSSFEKNPIDFLEAKGYKEVKKDLIIKLPKYSLFELENGRKRMLA |
| | | SAGELQKGNELALPSKYVNFLYLASHYEKLKGSPEDNEQKQLFVE |
| | | QHKHYLDEIIEQISEFSKRVILADANLDKVLSAYNKHRDKPIREQAEN |
| | | IIHLFTLTNLGAPAAFKYFDTTIDRKRYTSTKEVLDATLIHQSITGLYET |
| | | RIDLSQLGGD |
| 126 TadACP65ins | 1354 | MDKKYSIGLAIGTNSVGWAVITDEYKVPSKKFKVLGNTDRHSIKKNLI |
| 1003 polypeptide | | GALLFDSGETAEATRLKRTARRRYTRRKNRICYLQEIFSNEMAKVD |
| sequence | | DSFFHRLEESFLVEEDKKHERHPIFGNIVDEVAYHEKYPTIYHLRKK |
| | | LVDSTDKADLRLIYLALAHMIKFRGHFLIEGDLNPDNSDVDKLFIQLV |
| | | QTYNQLFEENPINASGVDAKAILSARLSKSRRLENLIAQLPGEKKNG |
| | | LFGNLIALSLGLTPNFKSNFDLAEDAKLQLSKDTYDDDLDNLLAQIG |
| | | DQYADLFLAAKNLSDAILLSDILRVNTEITKAPLSASMIKRYDEHHQD |
| | | LTLLKALVRQQLPEKYKEIFFDQSKNGYAGYIDGGASQEEFYKFIKPI |
| | | LEKMDGTEELLVKLNREDLLRKQRTFDNGSIPHQIHLGELHAILRRQ |
| | | EDFYPFLKDNREKIEKILTFRIPYYVGPLARGNSRFAWMTRKSEETIT |
| | | PWNFEEWDKGASAQSFIERMTNFDKNLPNEKVLPKHSLLYEYFTV |
| | | YNELTKVKYVTEGMRKPAFLSGEQKKAIVDLLFKTNRKVTVKQLKE |
| | | DYFKKIECFDSVEISGVEDRFNASLGTYHDLLKIIKDKDFLDNEENED |
| | | ILEDIVLTLTLFEDREMIEERLKTYAHLFDDKVMKQLKRRRYTGWGR |
| | | LSRKLINGIRDKQSGKTILDFLKSDGFANRNFMQLIHDDSLTFKEDIQ |
| | | KAQVSGQGDSLHEHIANLAGSPAIKKGILQTVKVVDELVKVMGRHK |
| | | PENIVIEMARENQTTQKGQKNSRERMKRIEEGIKELGSQILKEHPVE |
| | | NTQLQNEKLYLYYLQNGRDMYVDQELDINRLSDYDVDHIVPQSFLK |
| | | DDSIDNKVLTRSDKNRGKSDNVPSEEVVKKMKNYWRQLLNAKLITQ |
| | | RKFDNLTKAERGGLSELDKAGFIKRQLVETRQITKHVAQILDSRMNT |
| | | KYDENDKLIREVKVITLKSKLVSDFRKDFQFYKVREINNYHHAHDAY |
| | | LNAVVGTALIKKYPKTAHAEIMALRQGGLVMQNYRLIDATLYVTFEP |
| | | CVMCAGAMIHSRIGRVVFGVRNAKTGAAGSLMDVLHYPGMNHRV |
| | | EITEGILADECAALLCYFFRMPRQVFNAQKKAQSSTDGSSGSETPG |
| | | TSESATPESSGSEVEFSHEYWMRHALTLAKRARDEREVPVGAVLV |
| | | LNNRVIGEGWNRAIGLHDPLESEFVYGDYKVYDVRKMIAKSEQEIG |
| | | KATAKYFFYSNIMNFFKTEITLANGEIRKRPLIETNGETGEIVWDKGR |
| | | DFATVRKVLSMPQVNIVKKTEVQTGGFSKESILPKRNSDKLIARKKD |
| | | WDPKKYGGFDSPTVAYSVLVVAKVEKGKSKKLKSVKELLGITIMER |
| | | SSFEKNPIDFLEAKGYKEVKKDLIIKLPKYSLFELENGRKRMLASAGE |
| | | LQKGNELALPSKYVNFLYLASHYEKLKGSPEDNEQKQLFVEQHKHY |
| | | LDEIIEQISEFSKRVILADANLDKVLSAYNKHRDKPIREQAENIIHLFTL |
| | | TNLGAPAAFKYFDTTIDRKRYTSTKEVLDATLIHQSITGLYETRIDLS |
| | | QLGGD |
| 127 TadACP65ins | 1355 | MDKKYSIGLAIGTNSVGWAVITDEYKVPSKKFKVLGNTDRHSIKKNLI |
| 1016 polypeptide | | GALLFDSGETAEATRLKRTARRRYTRRKNRICYLQEIFSNEMAKVD |
| sequence | | DSFFHRLEESFLVEEDKKHERHPIFGNIVDEVAYHEKYPTIYHLRKK |
| | | LVDSTDKADLRLIYLALAHMIKFRGHFLIEGDLNPDNSDVDKLFIQLV |
| | | QTYNQLFEENPINASGVDAKAILSARLSKSRRLENLIAQLPGEKKNG |
| | | LFGNLIALSLGLTPNFKSNFDLAEDAKLQLSKDTYDDDLDNLLAQIG |
| | | DQYADLFLAAKNLSDAILLSDILRVNTEITKAPLSASMIKRYDEHHQD |
| | | LTLLKALVRQQLPEKYKEIFFDQSKNGYAGYIDGGASQEEFYKFIKPI |
| | | LEKMDGTEELLVKLNREDLLRKQRTFDNGSIPHQIHLGELHAILRRQ |
| | | EDFYPFLKDNREKIEKILTFRIPYYVGPLARGNSRFAWMTRKSEETIT |
| | | PWNFEEWDKGASAQSFIERMTNFDKNLPNEKVLPKHSLLYEYFTV |
| | | YNELTKVKYVTEGMRKPAFLSGEQKKAIVDLLFKTNRKVTVKQLKE |
| | | DYFKKIECFDSVEISGVEDRFNASLGTYHDLLKIIKDKDFLDNEENED |
| | | ILEDIVLTLTLFEDREMIEERLKTYAHLFDDKVMKQLKRRRYTGWGR |
| | | LSRKLINGIRDKQSGKTILDFLKSDGFANRNFMQLIHDDSLTFKEDIQ |
| | | KAQVSGQGDSLHEHIANLAGSPAIKKGILQTVKVVDELVKVMGRHK |
| | | PENIVIEMARENQTTQKGQKNSRERMKRIEEGIKELGSQILKEHPVE |
| | | NTQLQNEKLYLYYLQNGRDMYVDQELDINRLSDYDVDHIVPQSFLK |
| | | DDSIDNKVLTRSDKNRGKSDNVPSEEVVKKMKNYWRQLLNAKLITQ |
| | | RKFDNLTKAERGGLSELDKAGFIKRQLVETRQITKHVAQILDSRMNT |
| | | KYDENDKLIREVKVITLKSKLVSDFRKDFQFYKVREINNYHHAHDAY |
| | | LNAWGTALIKKYPKLESEFVYGDYKVTAHAEIMALRQGGLVMQNY |
| | | RLIDATLYVTFEPCVMCAGAMIHSRIGRWFGVRNAKTGAAGSLMD |
| | | VLHYPGMNHRVEITEGILADECAALLCYFFRMPRQVFNAQKKAQSS |
| | | TDGSSGSETPGTSESATPESSGSEVEFSHEYWMRHALTLAKRARD |
| | | EREVPVGAVLVLNNRVIGEGWNRAIGLHDPYDVRKMIAKSEQEIGK |
| | | ATAKYFFYSNIMNFFKTEITLANGEIRKRPLIETNGETGEIVWDKGRD |
| | | FATVRKVLSMPQVNIVKKTEVQTGGFSKESILPKRNSDKLIARKKDW |
| | | DPKKYGGFDSPTVAYSVLWAKVEKGKSKKLKSVKELLGITIMERSS |
| | | FEKNPIDFLEAKGYKEVKKDLIIKLPKYSLFELENGRKRMLASAGELQ |
| | | KGNELALPSKYVNFLYLASHYEKLKGSPEDNEQKQLFVEQHKHYLD |
| | | EIIEQISEFSKRVILADANLDKVLSAYNKHRDKPIREQAENIIHLFTLTN |
| | | LGAPAAFKYFDTTIDRKRYTSTKEVLDATLIHQSITGLYETRIDLSQL |
| | | GGD |
| 128 TadACP65ins | 1356 | MDKKYSIGLAIGTNSVGWAVITDEYKVPSKKFKVLGNTDRHSIKKNLI |
| 1022 polypeptide | | GALLFDSGETAEATRLKRTARRRYTRRKNRICYLQEIFSNEMAKVD |
| sequence | | DSFFHRLEESFLVEEDKKHERHPIFGNIVDEVAYHEKYPTIYHLRKK |
| | | LVDSTDKADLRLIYLALAHMIKFRGHFLIEGDLNPDNSDVDKLFIQLV |
| | | QTYNQLFEENPINASGVDAKAILSARLSKSRRLENLIAQLPGEKKNG |
| | | LFGNLIALSLGLTPNFKSNFDLAEDAKLQLSKDTYDDDLDNLLAQIG |
| | | DQYADLFLAAKNLSDAILLSDILRVNTEITKAPLSASMIKRYDEHHQD |
| | | LTLLKALVRQQLPEKYKEIFFDQSKNGYAGYIDGGASQEEFYKFIKPI |
| | | LEKMDGTEELLVKLNREDLLRKQRTFDNGSIPHQIHLGELHAILRRQ |
| | | EDFYPFLKDNREKIEKILTFRIPYYVGPLARGNSRFAWMTRKSEETIT |
| | | PWNFEEWDKGASAQSFIERMTNFDKNLPNEKVLPKHSLLYEYFTV |
| | | YNELTKVKYVTEGMRKPAFLSGEQKKAIVDLLFKTNRKVTVKQLKE |
| | | DYFKKIECFDSVEISGVEDRFNASLGTYHDLLKIIKDKDFLDNEENED |
| | | ILEDIVLTLTLFEDREMIEERLKTYAHLFDDKVMKQLKRRRYTGWGR |
| | | LSRKLINGIRDKQSGKTILDFLKSDGFANRNFMQLIHDDSLTFKEDIQ |
| | | KAQVSGQGDSLHEHIANLAGSPAIKKGILQTVKVVDELVKVMGRHK |
| | | PENIVIEMARENQTTQKGQKNSRERMKRIEEGIKELGSQILKEHPVE |
| | | NTQLQNEKLYLYYLQNGRDMYVDQELDINRLSDYDVDHIVPQSFLK |
| | | DDSIDNKVLTRSDKNRGKSDNVPSEEVVKKMKNYWRQLLNAKLITQ |
| | | RKFDNLTKAERGGLSELDKAGFIKRQLVETRQITKHVAQILDSRMNT |
| | | KYDENDKLIREVKVITLKSKLVSDFRKDFQFYKVREINNYHHAHDAY |
| | | LNAVVGTALIKKYPKLESEFVYGDYKVYDVRKMITAHAEIMALRQGG |
| | | LVMQNYRLIDATLYVTFEPCVMCAGAMIHSRIGRVVFGVRNAKTGA |
| | | AGSLMDVLHYPGMNHRVEITEGILADECAALLCYFFRMPRQVFNAQ |
| | | KKAQSSTDGSSGSETPGTSESATPESSGSEVEFSHEYWMRHALTL |
| | | AKRARDEREVPVGAVLVLNNRVIGEGWNRAIGLHDPAKSEQEIGKA |
| | | TAKYFFYSNIMNFFKTEITLANGEIRKRPLIETNGETGEIVWDKGRDF |
| | | ATVRKVLSMPQVNIVKKTEVQTGGFSKESILPKRNSDKLIARKKDW |
| | | DPKKYGGFDSPTVAYSVLWAKVEKGKSKKLKSVKELLGITIMERSS |
| | | FEKNPIDFLEAKGYKEVKKDLIIKLPKYSLFELENGRKRMLASAGELQ |
| | | KGNELALPSKYVNFLYLASHYEKLKGSPEDNEQKQLFVEQHKHYLD |
| | | EIIEQISEFSKRVILADANLDKVLSAYNKHRDKPIREQAENIIHLFTLTN |
| | | LGAPAAFKYFDTTIDRKRYTSTKEVLDATLIHQSITGLYETRIDLSQL |
| | | GGD |
| 129 TadACP65ins | 1357 | MDKKYSIGLAIGTNSVGWAVITDEYKVPSKKFKVLGNTDRHSIKKNLI |
| 1029 polypeptide | | GALLFDSGETAEATRLKRTARRRYTRRKNRICYLQEIFSNEMAKVD |
| sequence | | DSFFHRLEESFLVEEDKKHERHPIFGNIVDEVAYHEKYPTIYHLRKK |
| | | LVDSTDKADLRLIYLALAHMIKFRGHFLIEGDLNPDNSDVDKLFIQLV |
| | | QTYNQLFEENPINASGVDAKAILSARLSKSRRLENLIAQLPGEKKNG |
| | | LFGNLIALSLGLTPNFKSNFDLAEDAKLQLSKDTYDDDLDNLLAQIG |
| | | DQYADLFLAAKNLSDAILLSDILRVNTEITKAPLSASMIKRYDEHHQD |
| | | LTLLKALVRQQLPEKYKEIFFDQSKNGYAGYIDGGASQEEFYKFIKPI |
| | | LEKMDGTEELLVKLNREDLLRKQRTFDNGSIPHQIHLGELHAILRRQ |
| | | EDFYPFLKDNREKIEKILTFRIPYYVGPLARGNSRFAWMTRKSEETIT |
| | | PWNFEEWDKGASAQSFIERMTNFDKNLPNEKVLPKHSLLYEYFTV |
| | | YNELTKVKYVTEGMRKPAFLSGEQKKAIVDLLFKTNRKVTVKQLKE |
| | | DYFKKIECFDSVEISGVEDRFNASLGTYHDLLKIIKDKDFLDNEENED |
| | | ILEDIVLTLTLFEDREMIEERLKTYAHLFDDKVMKQLKRRRYTGWGR |
| | | LSRKLINGIRDKQSGKTILDFLKSDGFANRNFMQLIHDDSLTFKEDIQ |
| | | KAQVSGQGDSLHEHIANLAGSPAIKKGILQTVKVVDELVKVMGRHK |
| | | PENIVIEMARENQTTQKGQKNSRERMKRIEEGIKELGSQILKEHPVE |
| | | NTQLQNEKLYLYYLQNGRDMYVDQELDINRLSDYDVDHIVPQSFLK |
| | | DDSIDNKVLTRSDKNRGKSDNVPSEEVVKKMKNYWRQLLNAKLITQ |
| | | RKFDNLTKAERGGLSELDKAGFIKRQLVETRQITKHVAQILDSRMNT |
| | | KYDENDKLIREVKVITLKSKLVSDFRKDFQFYKVREINNYHHAHDAY |
| | | LNAWGTALIKKYPKLESEFVYGDYKVYDVRKMIAKSEQEITAHAEI |
| | | MALRQGGLVMQNYRLIDATLYVTFEPCVMCAGAMIHSRIGRVVFGV |
| | | RNAKTGAAGSLMDVLHYPGMNHRVEITEGILADECAALLCYFFRMP |
| | | RQVFNAQKKAQSSTDGSSGSETPGTSESATPESSGSEVEFSHEY |
| | | WMRHALTLAKRARDEREVPVGAVLVLNNRVIGEGWNRAIGLHDPG |
| | | KATAKYFFYSNIMNFFKTEITLANGEIRKRPLIETNGETGEIVWDKGR |
| | | DFATVRKVLSMPQVNIVKKTEVQTGGFSKESILPKRNSDKLIARKKD |
| | | WDPKKYGGFDSPTVAYSVLVVAKVEKGKSKKLKSVKELLGITIMER |
| | | SSFEKNPIDFLEAKGYKEVKKDLIIKLPKYSLFELENGRKRMLASAGE |
| | | LQKGNELALPSKYVNFLYLASHYEKLKGSPEDNEQKQLFVEQHKHY |
| | | LDEIIEQISEFSKRVILADANLDKVLSAYNKHRDKPIREQAENIIHLFTL |
| | | TNLGAPAAFKYFDTTIDRKRYTSTKEVLDATLIHQSITGLYETRIDLS |
| | | QLGGD |
| 130 TadACP65ins | 1358 | MDKKYSIGLAIGTNSVGWAVITDEYKVPSKKFKVLGNTDRHSIKKNLI |
| 1041 polypeptide | | GALLFDSGETAEATRLKRTARRRYTRRKNRICYLQEIFSNEMAKVD |
| sequence | | DSFFHRLEESFLVEEDKKHERHPIFGNIVDEVAYHEKYPTIYHLRKK |
| | | LVDSTDKADLRLIYLALAHMIKFRGHFLIEGDLNPDNSDVDKLFIQLV |
| | | QTYNQLFEENPINASGVDAKAILSARLSKSRRLENLIAQLPGEKKNG |
| | | LFGNLIALSLGLTPNFKSNFDLAEDAKLQLSKDTYDDDLDNLLAQIG |
| | | DQYADLFLAAKNLSDAILLSDILRVNTEITKAPLSASMIKRYDEHHQD |
| | | LTLLKALVRQQLPEKYKEIFFDQSKNGYAGYIDGGASQEEFYKFIKPI |
| | | LEKMDGTEELLVKLNREDLLRKQRTFDNGSIPHQIHLGELHAILRRQ |
| | | EDFYPFLKDNREKIEKILTFRIPYYVGPLARGNSRFAWMTRKSEETIT |
| | | PWNFEEVVDKGASAQSFIERMTNFDKNLPNEKVLPKHSLLYEYFTV |
| | | YNELTKVKYVTEGMRKPAFLSGEQKKAIVDLLFKTNRKVTVKQLKE |
| | | DYFKKIECFDSVEISGVEDRFNASLGTYHDLLKIIKDKDFLDNEENED |
| | | ILEDIVLTLTLFEDREMIEERLKTYAHLFDDKVMKQLKRRRYTGWGR |
| | | LSRKLINGIRDKQSGKTILDFLKSDGFANRNFMQLIHDDSLTFKEDIQ |
| | | KAQVSGQGDSLHEHIANLAGSPAIKKGILQTVKVVDELVKVMGRHK |
| | | PENIVIEMARENQTTQKGQKNSRERMKRIEEGIKELGSQILKEHPVE |
| | | NTQLQNEKLYLYYLQNGRDMYVDQELDINRLSDYDVDHIVPQSFLK |
| | | DDSIDNKVLTRSDKNRGKSDNVPSEEVVKKMKNYWRQLLNAKLITQ |
| | | RKFDNLTKAERGGLSELDKAGFIKRQLVETRQITKHVAQILDSRMNT |
| | | KYDENDKLIREVKVITLKSKLVSDFRKDFQFYKVREINNYHHAHDAY |
| | | LNAVVGTALIKKYPKLESEFVYGDYKVYDVRKMIAKSEQEIGKATAK |
| | | YFFYSTAHAEIMALRQGGLVMQNYRLIDATLYVTFEPCVMCAGAMI |
| | | HSRIGRVVFGVRNAKTGAAGSLMDVLHYPGMNHRVEITEGILADEC |
| | | AALLCYFFRMPRQVFNAQKKAQSSTDGSSGSETPGTSESATPESS |
| | | GSEVEFSHEYWMRHALTLAKRARDEREVPVGAVLVLNNRVIGEGW |
| | | NRAIGLHDPNIMNFFKTEITLANGEIRKRPLIETNGETGEIVWDKGRD |
| | | FATVRKVLSMPQVNIVKKTEVQTGGFSKESILPKRNSDKLIARKKDW |
| | | DPKKYGGFDSPTVAYSVLWAKVEKGKSKKLKSVKELLGITIMERSS |
| | | FEKNPIDFLEAKGYKEVKKDLIIKLPKYSLFELENGRKRMLASAGELQ |
| | | KGNELALPSKYVNFLYLASHYEKLKGSPEDNEQKQLFVEQHKHYLD |
| | | EIIEQISEFSKRVILADANLDKVLSAYNKHRDKPIREQAENIIHLFTLTN |
| | | LGAPAAFKYFDTTIDRKRYTSTKEVLDATLIHQSITGLYETRIDLSQL |
| | | GGD |
| 131 TadACP65ins | 1359 | MDKKYSIGLAIGTNSVGWAVITDEYKVPSKKFKVLGNTDRHSIKKNLI |
| 1054 polypeptide | | GALLFDSGETAEATRLKRTARRRYTRRKNRICYLQEIFSNEMAKVD |
| sequence | | DSFFHRLEESFLVEEDKKHERHPIFGNIVDEVAYHEKYPTIYHLRKK |
| | | LVDSTDKADLRLIYLALAHMIKFRGHFLIEGDLNPDNSDVDKLFIQLV |
| | | QTYNQLFEENPINASGVDAKAILSARLSKSRRLENLIAQLPGEKKNG |
| | | LFGNLIALSLGLTPNFKSNFDLAEDAKLQLSKDTYDDDLDNLLAQIG |
| | | DQYADLFLAAKNLSDAILLSDILRVNTEITKAPLSASMIKRYDEHHQD |
| | | LTLLKALVRQQLPEKYKEIFFDQSKNGYAGYIDGGASQEEFYKFIKPI |
| | | LEKMDGTEELLVKLNREDLLRKQRTFDNGSIPHQIHLGELHAILRRQ |
| | | EDFYPFLKDNREKIEKILTFRIPYYVGPLARGNSRFAWMTRKSEETIT |
| | | PWNFEEWDKGASAQSFIERMTNFDKNLPNEKVLPKHSLLYEYFTV |
| | | YNELTKVKYVTEGMRKPAFLSGEQKKAIVDLLFKTNRKVTVKQLKE |
| | | DYFKKIECFDSVEISGVEDRFNASLGTYHDLLKIIKDKDFLDNEENED |
| | | ILEDIVLTLTLFEDREMIEERLKTYAHLFDDKVMKQLKRRRYTGWGR |
| | | LSRKLINGIRDKQSGKTILDFLKSDGFANRNFMQLIHDDSLTFKEDIQ |
| | | KAQVSGQGDSLHEHIANLAGSPAIKKGILQTVKVVDELVKVMGRHK |
| | | PENIVIEMARENQTTQKGQKNSRERMKRIEEGIKELGSQILKEHPVE |
| | | NTQLQNEKLYLYYLQNGRDMYVDQELDINRLSDYDVDHIVPQSFLK |
| | | DDSIDNKVLTRSDKNRGKSDNVPSEEVVKKMKNYWRQLLNAKLITQ |
| | | RKFDNLTKAERGGLSELDKAGFIKRQLVETRQITKHVAQILDSRMNT |
| | | KYDENDKLIREVKVITLKSKLVSDFRKDFQFYKVREINNYHHAHDAY |
| | | LNAWGTALIKKYPKLESEFVYGDYKVYDVRKMIAKSEQEIGKATAK |
| | | YFFYSNIMNFFKTEITLANTAHAEIMALRQGGLVMQNYRLIDATLYVT |
| | | FEPCVMCAGAMIHSRIGRVVFGVRNAKTGAAGSLMDVLHYPGMNH |
| | | RVEITEGILADECAALLCYFFRMPRQVFNAQKKAQSSTDGSSGSET |
| | | PGTSESATPESSGSEVEFSHEYWMRHALTLAKRARDEREVPVGAV |
| | | LVLNNRVIGEGWNRAIGLHDPGEIRKRPLIETNGETGEIVWDKGRDF |
| | | ATVRKVLSMPQVNIVKKTEVQTGGFSKESILPKRNSDKLIARKKDW |
| | | DPKKYGGFDSPTVAYSVLWAKVEKGKSKKLKSVKELLGITIMERSS |
| | | FEKNPIDFLEAKGYKEVKKDLIIKLPKYSLFELENGRKRMLASAGELQ |
| | | KGNELALPSKYVNFLYLASHYEKLKGSPEDNEQKQLFVEQHKHYLD |
| | | EIIEQISEFSKRVILADANLDKVLSAYNKHRDKPIREQAENIIHLFTLTN |
| | | LGAPAAFKYFDTTIDRKRYTSTKEVLDATLIHQSITGLYETRIDLSQL |
| | | GGD |
| 132 TadACP65ins | 1360 | MDKKYSIGLAIGTNSVGWAVITDEYKVPSKKFKVLGNTDRHSIKKNLI |
| 1246 polypeptide | | GALLFDSGETAEATRLKRTARRRYTRRKNRICYLQEIFSNEMAKVD |
| sequence | | DSFFHRLEESFLVEEDKKHERHPIFGNIVDEVAYHEKYPTIYHLRKK |
| | | LVDSTDKADLRLIYLALAHMIKFRGHFLIEGDLNPDNSDVDKLFIQLV |
| | | QTYNQLFEENPINASGVDAKAILSARLSKSRRLENLIAQLPGEKKNG |
| | | LFGNLIALSLGLTPNFKSNFDLAEDAKLQLSKDTYDDDLDNLLAQIG |
| | | DQYADLFLAAKNLSDAILLSDILRVNTEITKAPLSASMIKRYDEHHQD |
| | | LTLLKALVRQQLPEKYKEIFFDQSKNGYAGYIDGGASQEEFYKFIKPI |
| | | LEKMDGTEELLVKLNREDLLRKQRTFDNGSIPHQIHLGELHAILRRQ |
| | | EDFYPFLKDNREKIEKILTFRIPYYVGPLARGNSRFAWMTRKSEETIT |
| | | PWNFEEVVDKGASAQSFIERMTNFDKNLPNEKVLPKHSLLYEYFTV |
| | | YNELTKVKYVTEGMRKPAFLSGEQKKAIVDLLFKTNRKVTVKQLKE |
| | | DYFKKIECFDSVEISGVEDRFNASLGTYHDLLKIIKDKDFLDNEENED |
| | | ILEDIVLTLTLFEDREMIEERLKTYAHLFDDKVMKQLKRRRYTGWGR |
| | | LSRKLINGIRDKQSGKTILDFLKSDGFANRNFMQLIHDDSLTFKEDIQ |
| | | KAQVSGQGDSLHEHIANLAGSPAIKKGILQTVKVVDELVKVMGRHK |
| | | PENIVIEMARENQTTQKGQKNSRERMKRIEEGIKELGSQILKEHPVE |
| | | NTQLQNEKLYLYYLQNGRDMYVDQELDINRLSDYDVDHIVPQSFLK |
| | | DDSIDNKVLTRSDKNRGKSDNVPSEEVVKKMKNYWRQLLNAKLITQ |
| | | RKFDNLTKAERGGLSELDKAGFIKRQLVETRQITKHVAQILDSRMNT |
| | | KYDENDKLIREVKVITLKSKLVSDFRKDFQFYKVREINNYHHAHDAY |
| | | LNAWGTALIKKYPKLESEFVYGDYKVYDVRKMIAKSEQEIGKATAK |
| | | YFFYSNIMNFFKTEITLANGEIRKRPLIETNGETGEIVWDKGRDFATV |
| | | RKVLSMPQVNIVKKTEVQTGGFSKESILPKRNSDKLIARKKDWDPK |
| | | KYGGFDSPTVAYSVLWAKVEKGKSKKLKSVKELLGITIMERSSFEK |
| | | NPIDFLEAKGYKEVKKDLIIKLPKYSLFELENGRKRMLASAGELQKG |
| | | NELALPSKYVNFLYLASHYEKLKGTAHAEIMALRQGGLVMQNYRLI |
| | | DATLYVTFEPCVMCAGAMIHSRIGRVVFGVRNAKTGAAGSLMDVL |
| | | HYPGMNHRVEITEGILADECAALLCYFFRMPRQVFNAQKKAQSSTD |
| | | GSSGSETPGTSESATPESSGSEVEFSHEYWMRHALTLAKRARDER |
| | | EVPVGAVLVLNNRVIGEGWNRAIGLHDPSPEDNEQKQLFVEQHKH |
| | | YLDEIIEQISEFSKRVILADANLDKVLSAYNKHRDKPIREQAENIIHLFT |
| | | LTNLGAPAAFKYFDTTIDRKRYTSTKEVLDATLIHQSITGLYETRIDLS |
| | | QLGGD |
| TadA polypeptide | 1363 | MGSHMTNDIYFMTLAIEEAKKAAQLGEVPIGAIITKDDEVIARAHNLR |
| sequence | | ETLQQPTAHAEHIAIERAAKVLGSWRLEGCTLYVTLEPCVMCAGTIV |
| | | MSRIPRWYGADDPKGGCSGSLMNLLQQSNFNHRAIVDKGVLKEA |
| | | CSTLLTTFFKNLRANKKSTN |
| TadA polypeptide | 1364 | MTQDELYMKEAIKEAKKAEEKGEVPIGAVLVINGEIIARAHNLRETEQ |
| sequence | | RSIAHAEMLVIDEACKALGTWRLEGATLYVTLEPCPMCAGAVVLSR |
| | | VEKVVFGAFDPKGGCSGTLMNLLQEERFNHQAEVVSGVLEEECG |
| | | GMLSAFFRELRKKKKAARKNLSE |
| TadA polypeptide | 1365 | MPPAFITGVTSLSDVELDHEYWMRHALTLAKRAWDEREVPVGAVL |
| sequence | | VHNHRVIGEGWNRPIGRHDPTAHAEIMALRQGGLVLQNYRLLDTTL |
| | | YVTLEPCVMCAGAMVHSRIGRVVFGARDAKTGAAGSLIDVLHHPG |
| | | MNHRVEHEGVLRDECATLLSDFFRMRRQEIKALKKADRAEGAGPA |
| | | V |
| TadA polypeptide | 1366 | MDEYWMQVAMQMAEKAEAAGEVPVGAVLVKDGQQIATGYNLSIS |
| sequence | | QHDPTAHAEILCLRSAGKKLENYRLLDATLYITLEPCAMCAGAMVH |
| | | SRIARVVYGARDEKTGAAGTVVNLLQHPAFNHQVEVTSGVLAEAC |
| | | SAQLSRFFKRRRDEKKALKLAQRAQQGIE |
| TadA polypeptide | 1367 | MDAAKVRSEFDEKMMRYALELADKAEALGEIPVGAVLVDDARNIIG |
| sequence | | EGWNLSIVQSDPTAHAEIIALRNGAKNIQNYRLLNSTLYVTLEPCTM |
| | | CAGAILHSRIKRLVFGASDYKTGAIGSRFHFFDDYKMNHTLEITSGV |
| | | LAEECSQKLSTFFQKRREEKKIEKALLKSLSDK |
| TadA polypeptide | 1368 | MRTDESEDQDHRMMRLALDAARAAAEAGETPVGAVILDPSTGEVI |
| sequence | | ATAGNGPIAAHDPTAHAEIAAMRAAAAKLGNYRLTDLTLWTLEPCA |
| | | MCAGAISHARIGRVVFGADDPKGGAVVHGPKFFAQPTCHWRPEVT |
| | | GGVLADESADLLRGFFRARRKAKI |
| TadA polypeptide | 1369 | MSSLKKTPIRDDAYWMGKAIREAAKAAARDEVPIGAVIVRDGAVIGR |
| sequence | | GHNLREGSNDPSAHAEMIAIRQAARRSANWRLTGATLYVTLEPCL |
| | | MCMGAIILARLERWFGCYDPKGGAAGSLYDLSADPRLNHQVRLSP |
| | | GVCQEECGTMLSDFFRDLRRRKKAKATPALFIDERKVPPEP |
| ecT adA | 1370 | MSEVEFSHEYWMRHALTLAKRARDEREVPVGAVLVLNNRVIGEGW |
| polypeptide | | NRAIGLHDPTAHAEIMALRQGGLVMQNYRLIDATLYVTFEPCVMCA |
| sequence | | GAMIHSRIGRVVFGVRNAKTGAAGSLMDVLHYPGMNHRVEITEGIL |
| | | ADECAALLCYFFRMPRQVFNAQKKAQSSTD |
| TadA*7.10 | 8 | MSEVEFSHEYWMRHALTLAKRARDEREVPVGAVLVLNNRVIGEGW |
| | | NRAIGLHDPTAHAEIMALRQGGLVMQNYRLIDATLYVTFEPCVMCA |
| | | GAMIHSRIGRVVFGVRNAKTGAAGSLMDVLHYPGMNHRVEITEGIL |
| | | ADECAALLCYFFRMPRQVFNAQKKAQSSTD |
| TadA*8 | 12 | MSEVEFSHEYWMRHALTLAKRARDEREVPVGAVLVLNNRVIGEGW |
| | | NRAIGLHDPTAHAEIMALRQGGLVMQNYRLIDATLYVTFEPCVMCA |
| | | GAMIHSRIGRVVFGVRNAKTGAAGSLMDVLHYPGMNHRVEITEGIL |
| | | ADECAALLCTFFRMPRQVFNAQKKAQSSTD |
| gRNA scaffold | 224 | GUUUUAGAGCUAGAAAUAGCAAGUUAAAAUAAGGCUAGUCCGU |
| nucleotide | | UAUCAACUUGAAAAAGUGGCACCGAGUCGGUGCUUUU |
| sequence | | |
| gRNA scaffold | 225 | GUUUUUGUACUCUCAAGAUUUAAGUAACUGUACAACGAAACUU |
| nucleotide | | ACACAGUUACUUAAAUCUUGCAGAAGCUACAAAGAUAAGGCUU |
| sequence | | CAUGCCGAAAUCAACACCCUGUCAUUUUAUGGCAGGGUG |
| S. pyogenes gRNA | 226 | GUUUUAGAGCUAGAAAUAGCAAGUUAAAAUAAGGCUAGUCCGU |
| scaffold nucleotide | | UAUCAACUUGAAAAAGUGGCACCGAGUCGGUGC |
| sequence | | |
| S. aureus gRNA | 227 | GUUUUAGUACUCUGUAAUGAAAAUUACAGAAUCUACUAAAACA |
| scaffold nucleotide | | AGGCAAAAUGCCGUGUUUAUCUCGUCAACUUGUUGGCGAGA |
| sequence | | |
| BhCas12bgRNA | 228 | GUUCUGUCUUUUGGUCAGGACAACCGUCUAGCUAUAAGUGCU |
| scaffold nucleotide | | GCAGGGUGUGAGAAACUCCUAUUGCUGGACGAUGUCUCUUAC |
| sequence | | GAGGCAUUAGCAC |
| BvCas12bgRNA | 229 | GACCUAUAGGGUCAAUGAAUCUGUGCGUGUGCCAUAAGUAAU |
| scaffold nucleotide | | UAAAAAUUACCCACCACAGGAGCACCUGAAAACAGGUGCUUGG |
| sequence | | CAC |
| gRNA scaffold | 230 | GUUUUAGAGCUAGAAAUAGCAAGUUAAAAUAAGGCUAGUCCGU |
| nucleotide | | UAUCAACUUGAAAAAGUGGGACCGAGUCGGUGCUUUU |
| sequence | | |
| gRNA scaffold | 3000 | GUUUUAGAGCUAGAAAUAGCAAGUUAAAAUAAGGCUAGUCCGU |
| nucleotide | | UAUCAACUUGAAAAAGUGGCACCGAGUCGGUGCUUUU |
| sequence | | |
| BhCas12bgRNA | 243 | GUUCUGUCUUUUGGUCAGGACAACCGUCUAGCUAUAAGUGCU |
| scaffold + guide | | GCAGGGUGUGAGAAACUCCUAUUGCUGGACGAUGUCUCUUAC |
| sequence | | GAGGCAUUAGCACNNNNNNNNNNNNNNNNNNNN |
| BvCas12bgRNA | 244 | GACCUAUAGGGUCAAUGAAUCUGUGCGUGUGCCAUAAGUAAU |
| scaffold + guide | | UAAAAAUUACCCACCACAGGAGCACCUGAAAACAGGUGCUUGG |
| sequence | | CACNNNNNNNNNNNNNNNNNNNN |
| AaCas12bgRNA | 245 | GUCUAAAGGACAGAAUUUUUCAACGGGUGUGCCAAUGGCCAC |
| scaffold + guide | | UUUCCAGGUGGCAAAGCCCGUUGAACUUCUCAAAAAGAACGAU |
| sequence | | CUGAGAAGUGGCACNNNNNNNNNNNNNNNNNNNN |
| SpyMacCas9 | 1307 | MDKKYSIGLDIGTNSVGWAVITDDYKVPSKKFKVLGNTDRHSIKKNL |
| polypeptide | | IGALLFGSGETAEATRLKRTARRRYTRRKNRICYLQEIFSNEMAKVD |
| sequence | | DSFFHRLEESFLVEEDKKHERHPIFGNIVDEVAYHEKYPTIYHLRKK |
| | | LADSTDKADLRLIYLALAHMIKFRGHFLIEGDLNPDNSDVDKLFIQLV |
| | | QIYNQLFEENPINASRVDAKAILSARLSKSRRLENLIAQLPGEKRNGL |
| | | FGNLIALSLGLTPNFKSNFDLAEDAKLQLSKDTYDDDLDNLLAQIGD |
| | | QYADLFLAAKNLSDAILLSDILRVNSEITKAPLSASMIKRYDEHHQDL |
| | | TLLKALVRQQLPEKYKEIFFDQSKNGYAGYIDGGASQEEFYKFIKPIL |
| | | EKMDGTEELLVKLNREDLLRKQRTFDNGSIPHQIHLGELHAILRRQE |
| | | DFYPFLKDNREKIEKILTFRIPYYVGPLARGNSRFAWMTRKSEETITP |
| | | WNFEEVVDKGASAQSFIERMTNFDKNLPNEKVLPKHSLLYEYFTVY |
| | | NELTKVKYVTEGMRKPAFLSGEQKKAIVDLLFKTNRKVTVKQLKED |
| | | YFKKIECFDSVEISGVEDRFNASLGAYHDLLKIIKDKDFLDNEENEDI |
| | | LEDIVLTLTLFEDRGMIEERLKTYAHLFDDKVMKQLKRRRYTGWGR |
| | | LSRKLINGIRDKQSGKTILDFLKSDGFANRNFMQLIHDDSLTFKEDIQ |
| | | KAQVSGQGHSLHEQIANLAGSPAIKKGILQTVKIVDELVKVMGHKPE |
| | | NMEMARENQTTQKGQKNSRERMKRIEEGIKELGSQILKEHPVENT |
| | | QLQNEKLYLYYLQNGRDMYVDQELDINRLSDYDVDHIVPQSFIKDD |
| | | SIDNKVLTRSDKNRGKSDNVPSEEVVKKMKNYWRQLLNAKLITQRK |
| | | FDNLTKAERGGLSELDKAGFIKRQLVETRQITKHVAQILDSRMNTKY |
| | | DENDKLIREVKVITLKSKLVSDFRKDFQFYKVREINNYHHAHDAYLN |
| | | AWGTALIKKYPKLESEFVYGDYKVYDVRKMIAKSEQEIGKATAKYF |
| | | FYSNIMNFFKTEITLANGEIRKRPLIETNGETGEIVWDKGRDFATVRK |
| | | VLSMPQVNIVKKTEIQTVGQNGGLFDDNPKSPLEVTPSKLVPLKKEL |
| | | NPKKYGGYQKPTTAYPVLLITDTKQLIPISVMNKKQFEQNPVKFLRD |
| | | RGYQQVGKNDFIKLPKYTLVDIGDGIKRLWASSKEIHKGNQLVVSKK |
| | | SQILLYHAHHLDSDLSNDYLQNHNQQFDVLFNEIISFSKKCKLGKEHI |
| | | QKIENVYSNKKNSASIEELAESFIKLLGFTQLGATSPFNFLGVKLNQK |
| | | QYKGKKDYILPCTEGTLIRQSITGLYETRVDLSKIGED |
| NLS | 83 | PKKKRKVEGADKRTADGSEFESPKKKRKV |
| NLS | 84 | KRTADGSEFESPKKKRKV |
| NLS | 85 | KRPAATKKAGQAKKKK |
| NLS | 86 | KKTELQTTNAENKTKKL |
| NLS | 87 | KRGINDRNFWRGENGRKTR |
| NLS | 1424 | RKSGKIAAIVVKRPRKPKKKRKV |
| NLS | 90 | MDSLLMNRRKFLYQFKNVRWAKGRRETYLC |
| Linker | 1425 | (SGGS)2 |
| PNMG-B335 | 1426 | MSEVEFSHEYWMRHALTLAKRARDEREVPVGAVLVLNNRVIGEGW |
| ABE8.1_Y147T_ | | NRAIGLHDPTAHAEIMALRQGGLVMQNYRLIDATLYVTFEPCVMCA |
| CP5_NGC | | GAMIHSRIGRVVFGVRNAKTGAAGSLMDVLHYPGMNHRVEITEGIL |
| PAM_monomer | | ADECAALLCTFFRMPRQVFNAQKKAQSSTDSGGSSGGSSGSETP |
| polypeptide | | GTSESATPESSGGSSGGSEIGKATAKYFFYSNIMNFFKTEITLANGE |
| sequence | | IRKRPLIETNGETGEIVWDKGRDFATVRKVLSMPQVNIVKKTEVQTG |
| | | GFSKESILPKRNSDKLIARKKDWDPKKYGGFMQPTVAYSVLWAKV |
| | | EKGKSKKLKSVKELLGITIMERSSFEKNPIDFLEAKGYKEVKKDLIIKL |
| | | PKYSLFELENGRKRMLASAKFLQKGNELALPSKYVNFLYLASHYEK |
| | | LKGSPEDNEQKQLFVEQHKHYLDEIIEQISEFSKRVILADANLDKVLS |
| | | AYNKHRDKPIREQAENIIHLFTLTNLGAPRAFKYFDTTIARKEYRSTK |
| | | EVLDATLIHQSITGLYETRIDLSQLGGDGGSGGSGGSGGSGGSGG |
| | | SGGMDKKYSIGLAIGTNSVGWAVITDEYKVPSKKFKVLGNTDRHSIK |
| | | KNLIGALLFDSGETAEATRLKRTARRRYTRRKNRICYLQEIFSNEMA |
| | | KVDDSFFHRLEESFLVEEDKKHERHPIFGNIVDEVAYHEKYPTIYHL |
| | | RKKLVDSTDKADLRLIYLALAHMIKFRGHFLIEGDLNPDNSDVDKLFI |
| | | QLVQTYNQLFEENPINASGVDAKAILSARLSKSRRLENLIAQLPGEK |
| | | KNGLFGNLIALSLGLTPNFKSNFDLAEDAKLQLSKDTYDDDLDNLLA |
| | | QIGDQYADLFLAAKNLSDAILLSDILRVNTEITKAPLSASMIKRYDEH |
| | | HQDLTLLKALVRQQLPEKYKEIFFDQSKNGYAGYIDGGASQEEFYK |
| | | FIKPILEKMDGTEELLVKLNREDLLRKQRTFDNGSIPHQIHLGELHAIL |
| | | RRQEDFYPFLKDNREKIEKILTFRIPYYVGPLARGNSRFAWMTRKS |
| | | EETITPWNFEEWDKGASAQSFIERMTNFDKNLPNEKVLPKHSLLY |
| | | EYFTVYNELTKVKYVTEGMRKPAFLSGEQKKAIVDLLFKTNRKVTVK |
| | | QLKEDYFKKIECFDSVEISGVEDRFNASLGTYHDLLKIIKDKDFLDNE |
| | | ENEDILEDIVLTLTLFEDREMIEERLKTYAHLFDDKVMKQLKRRRYT |
| | | GWGRLSRKLINGIRDKQSGKTILDFLKSDGFANRNFMQLIHDDSLTF |
| | | KEDIQKAQVSGQGDSLHEHIANLAGSPAIKKGILQTVKVVDELVKVM |
| | | GRHKPENIVIEMARENQTTQKGQKNSRERMKRIEEGIKELGSQILKE |
| | | HPVENTQLQNEKLYLYYLQNGRDMYVDQELDINRLSDYDVDHIVPQ |
| | | SFLKDDSIDNKVLTRSDKNRGKSDNVPSEEVVKKMKNYWRQLLNA |
| | | KLITQRKFDNLTKAERGGLSELDKAGFIKRQLVETRQITKHVAQILDS |
| | | RMNTKYDENDKLIREVKVITLKSKLVSDFRKDFQFYKVREINNYHHA |
| | | HDAYLNAWGTALIKKYPKLESEFVYGDYKVYDVRKMIAKSEQEGA |
| | | DKRTADGSEFESPKKKRKV |
| PNMG- | 1427 | MSEVEFSHEYWMRHALTLAKRAWDEREVPVGAVLVHNNRVIGEG |
| 357_ABE8.14 with | | WNRPIGRHDPTAHAEIMALRQGGLVMQNYRLIDATLYVTLEPCVMC |
| NGC PAM CP5 | | AGAMIHSRIGRVVFGARDAKTGAAGSLMDVLHHPGMNHRVEITEGI |
| polypeptide | | LADECAALLSDFFRMRRQEIKAQKKAQSSTDGGSSGGSSGSETPG |
| sequence | | TSESATPESSGGSSGGSMSEVEFSHEYWMRHALTLAKRARDERE |
| | | VPVGAVLVLNNRVIGEGWNRAIGLHDPTAHAEIMALRQGGLVMQN |
| | | YRLIDATLYVTFEPCVMCAGAMIHSRIGRVVFGVRNAKTGAAGSLM |
| | | DVLHYPGMNHRVEITEGILADECAALLCTFFRMPRQVFNAQKKAQS |
| | | STDSGGSSGGSSGSETPGTSESATPESSGGSSGGSEIGKATAKYF |
| | | FYSNIMNFFKTEITLANGEIRKRPLIETNGETGEIVWDKGRDFATVRK |
| | | VLSMPQVNIVKKTEVQTGGFSKESILPKRNSDKLIARKKDWDPKKY |
| | | GGFMQPTVAYSVLVVAKVEKGKSKKLKSVKELLGITIMERSSFEKN |
| | | PIDFLEAKGYKEVKKDLIIKLPKYSLFELENGRKRMLASAKFLQKGNE |
| | | LALPSKYVNFLYLASHYEKLKGSPEDNEQKQLFVEQHKHYLDEIIEQ |
| | | ISEFSKRVILADANLDKVLSAYNKHRDKPIREQAENIIHLFTLTNLGAP |
| | | RAFKYFDTTIARKEYRSTKEVLDATLIHQSITGLYETRIDLSQLGGDG |
| | | GSGGSGGSGGSGGSGGSGGMDKKYSIGLAIGTNSVGWAVITDEY |
| | | KVPSKKFKVLGNTDRHSIKKNLIGALLFDSGETAEATRLKRTARRRY |
| | | TRRKNRICYLQEIFSNEMAKVDDSFFHRLEESFLVEEDKKHERHPIF |
| | | GNIVDEVAYHEKYPTIYHLRKKLVDSTDKADLRLIYLALAHMIKFRGH |
| | | FLIEGDLNPDNSDVDKLFIQLVQTYNQLFEENPINASGVDAKAILSAR |
| | | LSKSRRLENLIAQLPGEKKNGLFGNLIALSLGLTPNFKSNFDLAEDA |
| | | KLQLSKDTYDDDLDNLLAQIGDQYADLFLAAKNLSDAILLSDILRVNT |
| | | EITKAPLSASMIKRYDEHHQDLTLLKALVRQQLPEKYKEIFFDQSKN |
| | | GYAGYIDGGASQEEFYKFIKPILEKMDGTEELLVKLNREDLLRKQRT |
| | | FDNGSIPHQIHLGELHAILRRQEDFYPFLKDNREKIEKILTFRIPYYVG |
| | | PLARGNSRFAWMTRKSEETITPWNFEEWDKGASAQSFIERMTNF |
| | | DKNLPNEKVLPKHSLLYEYFTVYNELTKVKYVTEGMRKPAFLSGEQ |
| | | KKAIVDLLFKTNRKVTVKQLKEDYFKKIECFDSVEISGVEDRFNASL |
| | | GTYHDLLKIIKDKDFLDNEENEDILEDIVLTLTLFEDREMIEERLKTYA |
| | | HLFDDKVMKQLKRRRYTGWGRLSRKLINGIRDKQSGKTILDFLKSD |
| | | GFANRNFMQLIHDDSLTFKEDIQKAQVSGQGDSLHEHIANLAGSPAI |
| | | KKGILQTVKVVDELVKVMGRHKPENIVIEMARENQTTQKGQKNSRE |
| | | RMKRIEEGIKELGSQILKEHPVENTQLQNEKLYLYYLQNGRDMYVD |
| | | QELDINRLSDYDVDHIVPQSFLKDDSIDNKVLTRSDKNRGKSDNVP |
| | | SEEVVKKMKNYWRQLLNAKLITQRKFDNLTKAERGGLSELDKAGFI |
| | | KRQLVETRQITKHVAQILDSRMNTKYDENDKLIREVKVITLKSKLVSD |
| | | FRKDFQFYKVREINNYHHAHDAYLNAVVGTALIKKYPKLESEFVYG |
| | | DYKVYDVRKMIAKSEQEGADKRTADGSEFESPKKKRKV |
| ABE8.8-m | 1428 | MSEVEFSHEYWMRHALTLAKRARDEREVPVGAVLVLNNRVIGEGW |
| polypeptide | | NRAIGLHDPTAHAEIMALRQGGLVMQNYRLIDATLYVTFEPCVMCA |
| sequence | | GAMIHSRIGRWFGVRNAKTGAAGSLMDVLHHPGMNHRVEITEGIL |
| | | ADECAALLCRFFRMPRRVFNAQKKAQSSTDSGGSSGGSSGSETP |
| | | GTSESATPESSGGSSGGSDKKYSIGLAIGTNSVGWAVITDEYKVPS |
| | | KKFKVLGNTDRHSIKKNLIGALLFDSGETAEATRLKRTARRRYTRRK |
| | | NRICYLQEIFSNEMAKVDDSFFHRLEESFLVEEDKKHERHPIFGNIV |
| | | DEVAYHEKYPTIYHLRKKLVDSTDKADLRLIYLALAHMIKFRGHFLIE |
| | | GDLNPDNSDVDKLFIQLVQTYNQLFEENPINASGVDAKAILSARLSK |
| | | SRRLENLIAQLPGEKKNGLFGNLIALSLGLTPNFKSNFDLAEDAKLQ |
| | | LSKDTYDDDLDNLLAQIGDQYADLFLAAKNLSDAILLSDILRVNTEITK |
| | | APLSASMIKRYDEHHQDLTLLKALVRQQLPEKYKEIFFDQSKNGYA |
| | | GYIDGGASQEEFYKFIKPILEKMDGTEELLVKLNREDLLRKQRTFDN |
| | | GSIPHQIHLGELHAILRRQEDFYPFLKDNREKIEKILTFRIPYYVGPLA |
| | | RGNSRFAWMTRKSEETITPWNFEEVVDKGASAQSFIERMTNFDKN |
| | | LPNEKVLPKHSLLYEYFTVYNELTKVKYVTEGMRKPAFLSGEQKKAI |
| | | VDLLFKTNRKVTVKQLKEDYFKKIECFDSVEISGVEDRFNASLGTYH |
| | | DLLKIIKDKDFLDNEENEDILEDIVLTLTLFEDREMIEERLKTYAHLFD |
| | | DKVMKQLKRRRYTGWGRLSRKLINGIRDKQSGKTILDFLKSDGFAN |
| | | RNFMQLIHDDSLTFKEDIQKAQVSGQGDSLHEHIANLAGSPAIKKGI |
| | | LQTVKVVDELVKVMGRHKPENIVIEMARENQTTQKGQKNSRERMK |
| | | RIEEGIKELGSQILKEHPVENTQLQNEKLYLYYLQNGRDMYVDQEL |
| | | DINRLSDYDVDHIVPQSFLKDDSIDNKVLTRSDKNRGKSDNVPSEE |
| | | VVKKMKNYWRQLLNAKLITQRKFDNLTKAERGGLSELDKAGFIKRQ |
| | | LVETRQITKHVAQILDSRMNTKYDENDKLIREVKVITLKSKLVSDFRK |
| | | DFQFYKVREINNYHHAHDAYLNAVVGTALIKKYPKLESEFVYGDYK |
| | | VYDVRKMIAKSEQEIGKATAKYFFYSNIMNFFKTEITLANGEIRKRPLI |
| | | ETNGETGEIVWDKGRDFATVRKVLSMPQVNIVKKTEVQTGGFSKE |
| | | SILPKRNSDKLIARKKDWDPKKYGGFDSPTVAYSVLVVAKVEKGKS |
| | | KKLKSVKELLGITIMERSSFEKNPIDFLEAKGYKEVKKDLIIKLPKYSL |
| | | FELENGRKRMLASAGELQKGNELALPSKYVNFLYLASHYEKLKGSP |
| | | EDNEQKQLFVEQHKHYLDEIIEQISEFSKRVILADANLDKVLSAYNKH |
| | | RDKPIREQAENIIHLFTLTNLGAPAAFKYFDTTIDRKRYTSTKEVLDA |
| | | TLIHQSITGLYETRIDLSQLGGDEGADKRTADGSEFESPKKKRKV |
| ABE.-d | 1429 | MSEVEFSHEYWMRHALTLAKRAWDEREVPVGAVLVHNNRVIGEG |
| polypeptide | | WNRPIGRHDPTAHAEIMALRQGGLVMQNYRLIDATLYVTLEPCVMC |
| sequence | | AGAMIHSRIGRVVFGARDAKTGAAGSLMDVLHHPGMNHRVEITEGI |
| | | LADECAALLSDFFRMRRQEIKAQKKAQSSTDSGGSSGGSSGSETP |
| | | GTSESATPESSGGSSGGSSEVEFSHEYWMRHALTLAKRARDERE |
| | | VPVGAVLVLNNRVIGEGWNRAIGLHDPTAHAEIMALRQGGLVMQN |
| | | YRLIDATLYVTFEPCVMCAGAMIHSRIGRVVFGVRNAKTGAAGSLM |
| | | DVLHHPGMNHRVEITEGILADECAALLCRFFRMPRRVFNAQKKAQS |
| | | STDSGGSSGGSSGSETPGTSESATPESSGGSSGGSDKKYSIGLAI |
| | | GTNSVGWAVITDEYKVPSKKFKVLGNTDRHSIKKNLIGALLFDSGET |
| | | AEATRLKRTARRRYTRRKNRICYLQEIFSNEMAKVDDSFFHRLEES |
| | | FLVEEDKKHERHPIFGNIVDEVAYHEKYPTIYHLRKKLVDSTDKADL |
| | | RLIYLALAHMIKFRGHFLIEGDLNPDNSDVDKLFIQLVQTYNQLFEEN |
| | | PINASGVDAKAILSARLSKSRRLENLIAQLPGEKKNGLFGNLIALSLG |
| | | LTPNFKSNFDLAEDAKLQLSKDTYDDDLDNLLAQIGDQYADLFLAAK |
| | | NLSDAILLSDILRVNTEITKAPLSASMIKRYDEHHQDLTLLKALVRQQ |
| | | LPEKYKEIFFDQSKNGYAGYIDGGASQEEFYKFIKPILEKMDGTEEL |
| | | LVKLNREDLLRKQRTFDNGSIPHQIHLGELHAILRRQEDFYPFLKDN |
| | | REKIEKILTFRIPYYVGPLARGNSRFAWMTRKSEETITPWNFEEVVD |
| | | KGASAQSFIERMTNFDKNLPNEKVLPKHSLLYEYFTVYNELTKVKYV |
| | | TEGMRKPAFLSGEQKKAIVDLLFKTNRKVTVKQLKEDYFKKIECFDS |
| | | VEISGVEDRFNASLGTYHDLLKIIKDKDFLDNEENEDILEDIVLTLTLF |
| | | EDREMIEERLKTYAHLFDDKVMKQLKRRRYTGWGRLSRKLINGIRD |
| | | KQSGKTILDFLKSDGFANRNFMQLIHDDSLTFKEDIQKAQVSGQGD |
| | | SLHEHIANLAGSPAIKKGILQTVKVVDELVKVMGRHKPENIVIEMARE |
| | | NQTTQKGQKNSRERMKRIEEGIKELGSQILKEHPVENTQLQNEKLY |
| | | LYYLQNGRDMYVDQELDINRLSDYDVDHIVPQSFLKDDSIDNKVLT |
| | | RSDKNRGKSDNVPSEEWKKMKNYWRQLLNAKLITQRKFDNLTKA |
| | | ERGGLSELDKAGFIKRQLVETRQITKHVAQILDSRMNTKYDENDKLI |
| | | REVKVITLKSKLVSDFRKDFQFYKVREINNYHHAHDAYLNAWGTAL |
| | | IKKYPKLESEFVYGDYKVYDVRKMIAKSEQEIGKATAKYFFYSNIMN |
| | | FFKTEITLANGEIRKRPLIETNGETGEIVWDKGRDFATVRKVLSMPQ |
| | | VNIVKKTEVQTGGFSKESILPKRNSDKLIARKKDWDPKKYGGFDSP |
| | | TVAYSVLWAKVEKGKSKKLKSVKELLGITIMERSSFEKNPIDFLEAK |
| | | GYKEVKKDLIIKLPKYSLFELENGRKRMLASAGELQKGNELALPSKY |
| | | VNFLYLASHYEKLKGSPEDNEQKQLFVEQHKHYLDEIIEQISEFSKR |
| | | VILADANLDKVLSAYNKHRDKPIREQAENIIHLFTLTNLGAPAAFKYF |
| | | DTTIDRKRYTSTKEVLDATLIHQSITGLYETRIDLSQLGGDEGADKRT |
| | | ADGSEFESPKKKRKV |
| ABE8.13-m | 1430 | MSEVEFSHEYWMRHALTLAKRARDEREVPVGAVLVLNNRVIGEGW |
| polypeptide | | NRAIGLHDPTAHAEIMALRQGGLVMQNYRLYDATLYVTFEPCVMCA |
| sequence | | GAMIHSRIGRVVFGVRNAKTGAAGSLMDVLHHPGMNHRVEITEGIL |
| | | ADECAALLCRFFRMPRRVFNAQKKAQSSTDSGGSSGGSSGSETP |
| | | GTSESATPESSGGSSGGSDKKYSIGLAIGTNSVGWAVITDEYKVPS |
| | | KKFKVLGNTDRHSIKKNLIGALLFDSGETAEATRLKRTARRRYTRRK |
| | | NRICYLQEIFSNEMAKVDDSFFHRLEESFLVEEDKKHERHPIFGNIV |
| | | DEVAYHEKYPTIYHLRKKLVDSTDKADLRLIYLALAHMIKFRGHFLIE |
| | | GDLNPDNSDVDKLFIQLVQTYNQLFEENPINASGVDAKAILSARLSK |
| | | SRRLENLIAQLPGEKKNGLFGNLIALSLGLTPNFKSNFDLAEDAKLQ |
| | | LSKDTYDDDLDNLLAQIGDQYADLFLAAKNLSDAILLSDILRVNTEITK |
| | | APLSASMIKRYDEHHQDLTLLKALVRQQLPEKYKEIFFDQSKNGYA |
| | | GYIDGGASQEEFYKFIKPILEKMDGTEELLVKLNREDLLRKQRTFDN |
| | | GSIPHQIHLGELHAILRRQEDFYPFLKDNREKIEKILTFRIPYYVGPLA |
| | | RGNSRFAWMTRKSEETITPWNFEEVVDKGASAQSFIERMTNFDKN |
| | | LPNEKVLPKHSLLYEYFTVYNELTKVKYVTEGMRKPAFLSGEQKKAI |
| | | VDLLFKTNRKVTVKQLKEDYFKKIECFDSVEISGVEDRFNASLGTYH |
| | | DLLKIIKDKDFLDNEENEDILEDIVLTLTLFEDREMIEERLKTYAHLFD |
| | | DKVMKQLKRRRYTGWGRLSRKLINGIRDKQSGKTILDFLKSDGFAN |
| | | RNFMQLIHDDSLTFKEDIQKAQVSGQGDSLHEHIANLAGSPAIKKGI |
| | | LQTVKWDELVKVMGRHKPENIVIEMARENQTTQKGQKNSRERMK |
| | | RIEEGIKELGSQILKEHPVENTQLQNEKLYLYYLQNGRDMYVDQEL |
| | | DINRLSDYDVDHIVPQSFLKDDSIDNKVLTRSDKNRGKSDNVPSEE |
| | | VVKKMKNYWRQLLNAKLITQRKFDNLTKAERGGLSELDKAGFIKRQ |
| | | LVETRQITKHVAQILDSRMNTKYDENDKLIREVKVITLKSKLVSDFRK |
| | | DFQFYKVREINNYHHAHDAYLNAVVGTALIKKYPKLESEFVYGDYK |
| | | VYDVRKMIAKSEQEIGKATAKYFFYSNIMNFFKTEITLANGEIRKRPLI |
| | | ETNGETGEIVWDKGRDFATVRKVLSMPQVNIVKKTEVQTGGFSKE |
| | | SILPKRNSDKLIARKKDWDPKKYGGFDSPTVAYSVLVVAKVEKGKS |
| | | KKLKSVKELLGITIMERSSFEKNPIDFLEAKGYKEVKKDLIIKLPKYSL |
| | | FELENGRKRMLASAGELQKGNELALPSKYVNFLYLASHYEKLKGSP |
| | | EDNEQKQLFVEQHKHYLDEIIEQISEFSKRVILADANLDKVLSAYNKH |
| | | RDKPIREQAENIIHLFTLTNLGAPAAFKYFDTTIDRKRYTSTKEVLDA |
| | | TLIHQSITGLYETRIDLSQLGGDEGADKRTADGSEFESPKKKRKV |
| ABE8.13-d | 1431 | MSEVEFSHEYWMRHALTLAKRAWDEREVPVGAVLVHNNRVIGEG |
| polypeptide | | WNRPIGRHDPTAHAEIMALRQGGLVMQNYRLIDATLYVTLEPCVMC |
| sequence | | AGAMIHSRIGRVVFGARDAKTGAAGSLMDVLHHPGMNHRVEITEGI |
| | | LADECAALLSDFFRMRRQEIKAQKKAQSSTDSGGSSGGSSGSETP |
| | | GTSESATPESSGGSSGGSSEVEFSHEYWMRHALTLAKRARDERE |
| | | VPVGAVLVLNNRVIGEGWNRAIGLHDPTAHAEIMALRQGGLVMQN |
| | | YRLYDATLYVTFEPCVMCAGAMIHSRIGRVVFGVRNAKTGAAGSLM |
| | | DVLHHPGMNHRVEITEGILADECAALLCRFFRMPRRVFNAQKKAQS |
| | | STDSGGSSGGSSGSETPGTSESATPESSGGSSGGSDKKYSIGLAI |
| | | GTNSVGWAVITDEYKVPSKKFKVLGNTDRHSIKKNLIGALLFDSGET |
| | | AEATRLKRTARRRYTRRKNRICYLQEIFSNEMAKVDDSFFHRLEES |
| | | FLVEEDKKHERHPIFGNIVDEVAYHEKYPTIYHLRKKLVDSTDKADL |
| | | RLIYLALAHMIKFRGHFLIEGDLNPDNSDVDKLFIQLVQTYNQLFEEN |
| | | PINASGVDAKAILSARLSKSRRLENLIAQLPGEKKNGLFGNLIALSLG |
| | | LTPNFKSNFDLAEDAKLQLSKDTYDDDLDNLLAQIGDQYADLFLAAK |
| | | NLSDAILLSDILRVNTEITKAPLSASMIKRYDEHHQDLTLLKALVRQQ |
| | | LPEKYKEIFFDQSKNGYAGYIDGGASQEEFYKFIKPILEKMDGTEEL |
| | | LVKLNREDLLRKQRTFDNGSIPHQIHLGELHAILRRQEDFYPFLKDN |
| | | REKIEKILTFRIPYYVGPLARGNSRFAWMTRKSEETITPWNFEEWVD |
| | | KGASAQSFIERMTNFDKNLPNEKVLPKHSLLYEYFTVYNELTKVKYV |
| | | TEGMRKPAFLSGEQKKAIVDLLFKTNRKVTVKQLKEDYFKKIECFDS |
| | | VEISGVEDRFNASLGTYHDLLKIIKDKDFLDNEENEDILEDIVLTLTLF |
| | | EDREMIEERLKTYAHLFDDKVMKQLKRRRYTGWGRLSRKLINGIRD |
| | | KQSGKTILDFLKSDGFANRNFMQLIHDDSLTFKEDIQKAQVSGQGD |
| | | SLHEHIANLAGSPAIKKGILQTVKVVDELVKVMGRHKPENIVIEMARE |
| | | NQTTQKGQKNSRERMKRIEEGIKELGSQILKEHPVENTQLQNEKLY |
| | | LYYLQNGRDMYVDQELDINRLSDYDVDHIVPQSFLKDDSIDNKVLT |
| | | RSDKNRGKSDNVPSEEVVKKMKNYWRQLLNAKLITQRKFDNLTKA |
| | | ERGGLSELDKAGFIKRQLVETRQITKHVAQILDSRMNTKYDENDKLI |
| | | REVKVITLKSKLVSDFRKDFQFYKVREINNYHHAHDAYLNAVVGTAL |
| | | IKKYPKLESEFVYGDYKVYDVRKMIAKSEQEIGKATAKYFFYSNIMN |
| | | FFKTEITLANGEIRKRPLIETNGETGEIVWDKGRDFATVRKVLSMPQ |
| | | VNIVKKTEVQTGGFSKESILPKRNSDKLIARKKDWDPKKYGGFDSP |
| | | TVAYSVLWAKVEKGKSKKLKSVKELLGITIMERSSFEKNPIDFLEAK |
| | | GYKEVKKDLIIKLPKYSLFELENGRKRMLASAGELQKGNELALPSKY |
| | | VNFLYLASHYEKLKGSPEDNEQKQLFVEQHKHYLDEIIEQISEFSKR |
| | | VILADANLDKVLSAYNKHRDKPIREQAENIIHLFTLTNLGAPAAFKYF |
| | | DTTIDRKRYTSTKEVLDATLIHQSITGLYETRIDLSQLGGDEGADKRT |
| | | ADGSEFESPKKKRKV |
| ABE8.17-m | 1432 | MSEVEFSHEYWMRHALTLAKRARDEREVPVGAVLVLNNRVIGEGW |
| polypeptide | | NRAIGLHDPTAHAEIMALRQGGLVMQNYRLIDATLYSTFEPCVMCA |
| sequence | | GAMIHSRIGRVVFGVRNAKTGAAGSLMDVLHYPGMNHRVEITEGIL |
| | | ADECAALLCYFFRMPRRVFNAQKKAQSSTDSGGSSGGSSGSETP |
| | | GTSESATPESSGGSSGGSDKKYSIGLAIGTNSVGWAVITDEYKVPS |
| | | KKFKVLGNTDRHSIKKNLIGALLFDSGETAEATRLKRTARRRYTRRK |
| | | NRICYLQEIFSNEMAKVDDSFFHRLEESFLVEEDKKHERHPIFGNIV |
| | | DEVAYHEKYPTIYHLRKKLVDSTDKADLRLIYLALAHMIKFRGHFLIE |
| | | GDLNPDNSDVDKLFIQLVQTYNQLFEENPINASGVDAKAILSARLSK |
| | | SRRLENLIAQLPGEKKNGLFGNLIALSLGLTPNFKSNFDLAEDAKLQ |
| | | LSKDTYDDDLDNLLAQIGDQYADLFLAAKNLSDAILLSDILRVNTEITK |
| | | APLSASMIKRYDEHHQDLTLLKALVRQQLPEKYKEIFFDQSKNGYA |
| | | GYIDGGASQEEFYKFIKPILEKMDGTEELLVKLNREDLLRKQRTFDN |
| | | GSIPHQIHLGELHAILRRQEDFYPFLKDNREKIEKILTFRIPYYVGPLA |
| | | RGNSRFAWMTRKSEETITPWNFEEVVDKGASAQSFIERMTNFDKN |
| | | LPNEKVLPKHSLLYEYFTVYNELTKVKYVTEGMRKPAFLSGEQKKAI |
| | | VDLLFKTNRKVTVKQLKEDYFKKIECFDSVEISGVEDRFNASLGTYH |
| | | DLLKIIKDKDFLDNEENEDILEDIVLTLTLFEDREMIEERLKTYAHLFD |
| | | DKVMKQLKRRRYTGWGRLSRKLINGIRDKQSGKTILDFLKSDGFAN |
| | | RNFMQLIHDDSLTFKEDIQKAQVSGQGDSLHEHIANLAGSPAIKKGI |
| | | LQTVKWDELVKVMGRHKPENIVIEMARENQTTQKGQKNSRERMK |
| | | RIEEGIKELGSQILKEHPVENTQLQNEKLYLYYLQNGRDMYVDQEL |
| | | DINRLSDYDVDHIVPQSFLKDDSIDNKVLTRSDKNRGKSDNVPSEE |
| | | VVKKMKNYWRQLLNAKLITQRKFDNLTKAERGGLSELDKAGFIKRQ |
| | | LVETRQITKHVAQILDSRMNTKYDENDKLIREVKVITLKSKLVSDFRK |
| | | DFQFYKVREINNYHHAHDAYLNAVVGTALIKKYPKLESEFVYGDYK |
| | | VYDVRKMIAKSEQEIGKATAKYFFYSNIMNFFKTEITLANGEIRKRPLI |
| | | ETNGETGEIVWDKGRDFATVRKVLSMPQVNIVKKTEVQTGGFSKE |
| | | SILPKRNSDKLIARKKDWDPKKYGGFDSPTVAYSVLVVAKVEKGKS |
| | | KKLKSVKELLGITIMERSSFEKNPIDFLEAKGYKEVKKDLIIKLPKYSL |
| | | FELENGRKRMLASAGELQKGNELALPSKYVNFLYLASHYEKLKGSP |
| | | EDNEQKQLFVEQHKHYLDEIIEQISEFSKRVILADANLDKVLSAYNKH |
| | | RDKPIREQAENIIHLFTLTNLGAPAAFKYFDTTIDRKRYTSTKEVLDA |
| | | TLIHQSITGLYETRIDLSQLGGDEGADKRTADGSEFESPKKKRKV |
| ABE8.17-d | 1433 | MSEVEFSHEYWMRHALTLAKRAWDEREVPVGAVLVHNNRVIGEG |
| polypeptide | | WNRPIGRHDPTAHAEIMALRQGGLVMQNYRLIDATLYVTLEPCVMC |
| sequence | | AGAMIHSRIGRVVFGARDAKTGAAGSLMDVLHHPGMNHRVEITEGI |
| | | LADECAALLSDFFRMRRQEIKAQKKAQSSTDSGGSSGGSSGSETP |
| | | GTSESATPESSGGSSGGSSEVEFSHEYWMRHALTLAKRARDERE |
| | | VPVGAVLVLNNRVIGEGWNRAIGLHDPTAHAEIMALRQGGLVMQN |
| | | YRLIDATLYSTFEPCVMCAGAMIHSRIGRWFGVRNAKTGAAGSLM |
| | | DVLHYPGMNHRVEITEGILADECAALLCYFFRMPRRVFNAQKKAQS |
| | | STDSGGSSGGSSGSETPGTSESATPESSGGSSGGSDKKYSIGLAI |
| | | GTNSVGWAVITDEYKVPSKKFKVLGNTDRHSIKKNLIGALLFDSGET |
| | | AEATRLKRTARRRYTRRKNRICYLQEIFSNEMAKVDDSFFHRLEES |
| | | FLVEEDKKHERHPIFGNIVDEVAYHEKYPTIYHLRKKLVDSTDKADL |
| | | RLIYLALAHMIKFRGHFLIEGDLNPDNSDVDKLFIQLVQTYNQLFEEN |
| | | PINASGVDAKAILSARLSKSRRLENLIAQLPGEKKNGLFGNLIALSLG |
| | | LTPNFKSNFDLAEDAKLQLSKDTYDDDLDNLLAQIGDQYADLFLAAK |
| | | NLSDAILLSDILRVNTEITKAPLSASMIKRYDEHHQDLTLLKALVRQQ |
| | | LPEKYKEIFFDQSKNGYAGYIDGGASQEEFYKFIKPILEKMDGTEEL |
| | | LVKLNREDLLRKQRTFDNGSIPHQIHLGELHAILRRQEDFYPFLKDN |
| | | REKIEKILTFRIPYYVGPLARGNSRFAWMTRKSEETITPWNFEEVVD |
| | | KGASAQSFIERMTNFDKNLPNEKVLPKHSLLYEYFTVYNELTKVKYV |
| | | TEGMRKPAFLSGEQKKAIVDLLFKTNRKVTVKQLKEDYFKKIECFDS |
| | | VEISGVEDRFNASLGTYHDLLKIIKDKDFLDNEENEDILEDIVLTLTLF |
| | | EDREMIEERLKTYAHLFDDKVMKQLKRRRYTGWGRLSRKLINGIRD |
| | | KQSGKTILDFLKSDGFANRNFMQLIHDDSLTFKEDIQKAQVSGQGD |
| | | SLHEHIANLAGSPAIKKGILQTVKVVDELVKVMGRHKPENIVIEMARE |
| | | NQTTQKGQKNSRERMKRIEEGIKELGSQILKEHPVENTQLQNEKLY |
| | | LYYLQNGRDMYVDQELDINRLSDYDVDHIVPQSFLKDDSIDNKVLT |
| | | RSDKNRGKSDNVPSEEWKKMKNYWRQLLNAKLITQRKFDNLTKA |
| | | ERGGLSELDKAGFIKRQLVETRQITKHVAQILDSRMNTKYDENDKLI |
| | | REVKVITLKSKLVSDFRKDFQFYKVREINNYHHAHDAYLNAWGTAL |
| | | IKKYPKLESEFVYGDYKVYDVRKMIAKSEQEIGKATAKYFFYSNIMN |
| | | FFKTEITLANGEIRKRPLIETNGETGEIVWDKGRDFATVRKVLSMPQ |
| | | VNIVKKTEVQTGGFSKESILPKRNSDKLIARKKDWDPKKYGGFDSP |
| | | TVAYSVLWAKVEKGKSKKLKSVKELLGITIMERSSFEKNPIDFLEAK |
| | | GYKEVKKDLIIKLPKYSLFELENGRKRMLASAGELQKGNELALPSKY |
| | | VNFLYLASHYEKLKGSPEDNEQKQLFVEQHKHYLDEIIEQISEFSKR |
| | | VILADANLDKVLSAYNKHRDKPIREQAENIIHLFTLTNLGAPAAFKYF |
| | | DTTIDRKRYTSTKEVLDATLIHQSITGLYETRIDLSQLGGDEGADKRT |
| | | ADGSEFESPKKKRKV |
| ABE8.20-m | 1434 | MSEVEFSHEYWMRHALTLAKRARDEREVPVGAVLVLNNRVIGEGW |
| polypeptide | | NRAIGLHDPTAHAEIMALRQGGLVMQNYRLYDATLYSTFEPCVMCA |
| sequence | | GAMIHSRIGRVVFGVRNAKTGAAGSLMDVLHHPGMNHRVEITEGIL |
| | | ADECAALLCRFFRMPRRVFNAQKKAQSSTDSGGSSGGSSGSETP |
| | | GTSESATPESSGGSSGGSDKKYSIGLAIGTNSVGWAVITDEYKVPS |
| | | KKFKVLGNTDRHSIKKNLIGALLFDSGETAEATRLKRTARRRYTRRK |
| | | NRICYLQEIFSNEMAKVDDSFFHRLEESFLVEEDKKHERHPIFGNIV |
| | | DEVAYHEKYPTIYHLRKKLVDSTDKADLRLIYLALAHMIKFRGHFLIE |
| | | GDLNPDNSDVDKLFIQLVQTYNQLFEENPINASGVDAKAILSARLSK |
| | | SRRLENLIAQLPGEKKNGLFGNLIALSLGLTPNFKSNFDLAEDAKLQ |
| | | LSKDTYDDDLDNLLAQIGDQYADLFLAAKNLSDAILLSDILRVNTEITK |
| | | APLSASMIKRYDEHHQDLTLLKALVRQQLPEKYKEIFFDQSKNGYA |
| | | GYIDGGASQEEFYKFIKPILEKMDGTEELLVKLNREDLLRKQRTFDN |
| | | GSIPHQIHLGELHAILRRQEDFYPFLKDNREKIEKILTFRIPYYVGPLA |
| | | RGNSRFAWMTRKSEETITPWNFEEVVDKGASAQSFIERMTNFDKN |
| | | LPNEKVLPKHSLLYEYFTVYNELTKVKYVTEGMRKPAFLSGEQKKAI |
| | | VDLLFKTNRKVTVKQLKEDYFKKIECFDSVEISGVEDRFNASLGTYH |
| | | DLLKIIKDKDFLDNEENEDILEDIVLTLTLFEDREMIEERLKTYAHLFD |
| | | DKVMKQLKRRRYTGWGRLSRKLINGIRDKQSGKTILDFLKSDGFAN |
| | | RNFMQLIHDDSLTFKEDIQKAQVSGQGDSLHEHIANLAGSPAIKKGI |
| | | LQTVKWDELVKVMGRHKPENIVIEMARENQTTQKGQKNSRERMK |
| | | RIEEGIKELGSQILKEHPVENTQLQNEKLYLYYLQNGRDMYVDQEL |
| | | DINRLSDYDVDHIVPQSFLKDDSIDNKVLTRSDKNRGKSDNVPSEE |
| | | VVKKMKNYWRQLLNAKLITQRKFDNLTKAERGGLSELDKAGFIKRQ |
| | | LVETRQITKHVAQILDSRMNTKYDENDKLIREVKVITLKSKLVSDFRK |
| | | DFQFYKVREINNYHHAHDAYLNAVVGTALIKKYPKLESEFVYGDYK |
| | | VYDVRKMIAKSEQEIGKATAKYFFYSNIMNFFKTEITLANGEIRKRPLI |
| | | ETNGETGEIVWDKGRDFATVRKVLSMPQVNIVKKTEVQTGGFSKE |
| | | SILPKRNSDKLIARKKDWDPKKYGGFDSPTVAYSVLVVAKVEKGKS |
| | | KKLKSVKELLGITIMERSSFEKNPIDFLEAKGYKEVKKDLIIKLPKYSL |
| | | FELENGRKRMLASAGELQKGNELALPSKYVNFLYLASHYEKLKGSP |
| | | EDNEQKQLFVEQHKHYLDEIIEQISEFSKRVILADANLDKVLSAYNKH |
| | | RDKPIREQAENIIHLFTLTNLGAPAAFKYFDTTIDRKRYTSTKEVLDA |
| | | TLIHQSITGLYETRIDLSQLGGDEGADKRTADGSEFESPKKKRKV |
| ABE8.20-d | 1435 | MSEVEFSHEYWMRHALTLAKRAWDEREVPVGAVLVHNNRVIGEG |
| polypeptide | | WNRPIGRHDPTAHAEIMALRQGGLVMQNYRLIDATLYVTLEPCVMC |
| sequence | | AGAMIHSRIGRVVFGARDAKTGAAGSLMDVLHHPGMNHRVEITEGI |
| | | LADECAALLSDFFRMRRQEIKAQKKAQSSTDSGGSSGGSSGSETP |
| | | GTSESATPESSGGSSGGSSEVEFSHEYWMRHALTLAKRARDERE |
| | | VPVGAVLVLNNRVIGEGWNRAIGLHDPTAHAEIMALRQGGLVMQN |
| | | YRLYDATLYSTFEPCVMCAGAMIHSRIGRVVFGVRNAKTGAAGSLM |
| | | DVLHHPGMNHRVEITEGILADECAALLCRFFRMPRRVFNAQKKAQS |
| | | STDSGGSSGGSSGSETPGTSESATPESSGGSSGGSDKKYSIGLAI |
| | | GTNSVGWAVITDEYKVPSKKFKVLGNTDRHSIKKNLIGALLFDSGET |
| | | AEATRLKRTARRRYTRRKNRICYLQEIFSNEMAKVDDSFFHRLEES |
| | | FLVEEDKKHERHPIFGNIVDEVAYHEKYPTIYHLRKKLVDSTDKADL |
| | | RLIYLALAHMIKFRGHFLIEGDLNPDNSDVDKLFIQLVQTYNQLFEEN |
| | | PINASGVDAKAILSARLSKSRRLENLIAQLPGEKKNGLFGNLIALSLG |
| | | LTPNFKSNFDLAEDAKLQLSKDTYDDDLDNLLAQIGDQYADLFLAAK |
| | | NLSDAILLSDILRVNTEITKAPLSASMIKRYDEHHQDLTLLKALVRQQ |
| | | LPEKYKEIFFDQSKNGYAGYIDGGASQEEFYKFIKPILEKMDGTEEL |
| | | LVKLNREDLLRKQRTFDNGSIPHQIHLGELHAILRRQEDFYPFLKDN |
| | | REKIEKILTFRIPYYVGPLARGNSRFAWMTRKSEETITPWNFEEVVD |
| | | KGASAQSFIERMTNFDKNLPNEKVLPKHSLLYEYFTVYNELTKVKYV |
| | | TEGMRKPAFLSGEQKKAIVDLLFKTNRKVTVKQLKEDYFKKIECFDS |
| | | VEISGVEDRFNASLGTYHDLLKIIKDKDFLDNEENEDILEDIVLTLTLF |
| | | EDREMIEERLKTYAHLFDDKVMKQLKRRRYTGWGRLSRKLINGIRD |
| | | KQSGKTILDFLKSDGFANRNFMQLIHDDSLTFKEDIQKAQVSGQGD |
| | | SLHEHIANLAGSPAIKKGILQTVKVVDELVKVMGRHKPENIVIEMARE |
| | | NQTTQKGQKNSRERMKRIEEGIKELGSQILKEHPVENTQLQNEKLY |
| | | LYYLQNGRDMYVDQELDINRLSDYDVDHIVPQSFLKDDSIDNKVLT |
| | | RSDKNRGKSDNVPSEEWKKMKNYWRQLLNAKLITQRKFDNLTKA |
| | | ERGGLSELDKAGFIKRQLVETRQITKHVAQILDSRMNTKYDENDKLI |
| | | REVKVITLKSKLVSDFRKDFQFYKVREINNYHHAHDAYLNAWGTAL |
| | | IKKYPKLESEFVYGDYKVYDVRKMIAKSEQEIGKATAKYFFYSNIMN |
| | | FFKTEITLANGEIRKRPLIETNGETGEIVWDKGRDFATVRKVLSMPQ |
| | | VNIVKKTEVQTGGFSKESILPKRNSDKLIARKKDWDPKKYGGFDSP |
| | | TVAYSVLWAKVEKGKSKKLKSVKELLGITIMERSSFEKNPIDFLEAK |
| | | GYKEVKKDLIIKLPKYSLFELENGRKRMLASAGELQKGNELALPSKY |
| | | VNFLYLASHYEKLKGSPEDNEQKQLFVEQHKHYLDEIIEQISEFSKR |
| | | VILADANLDKVLSAYNKHRDKPIREQAENIIHLFTLTNLGAPAAFKYF |
| | | DTTIDRKRYTSTKEVLDATLIHQSITGLYETRIDLSQLGGDEGADKRT |
| | | ADGSEFESPKKKRKV |
| 01. | 1436 | MSEVEFSHEYWMRHALTLAKRARDEREVPVGAVLVLNNRVIGEGW |
| monoABE8.1_bpNLS | | NRAIGLHDPTAHAEIMALRQGGLVMQNYRLIDATLYVTFEPCVMCA |
| + Y147T | | GAMIHSRIGRWFGVRNAKTGAAGSLMDVLHYPGMNHRVEITEGIL |
| polypeptide | | ADECAALLCTFFRMPRQVFNAQKKAQSSTDSGGSSGGSSGSETP |
| sequence | | GTSESATPESSGGSSGGSDKKYSIGLAIGTNSVGWAVITDEYKVPS |
| | | KKFKVLGNTDRHSIKKNLIGALLFDSGETAEATRLKRTARRRYTRRK |
| | | NRICYLQEIFSNEMAKVDDSFFHRLEESFLVEEDKKHERHPIFGNIV |
| | | DEVAYHEKYPTIYHLRKKLVDSTDKADLRLIYLALAHMIKFRGHFLIE |
| | | GDLNPDNSDVDKLFIQLVQTYNQLFEENPINASGVDAKAILSARLSK |
| | | SRRLENLIAQLPGEKKNGLFGNLIALSLGLTPNFKSNFDLAEDAKLQ |
| | | LSKDTYDDDLDNLLAQIGDQYADLFLAAKNLSDAILLSDILRVNTEITK |
| | | APLSASMIKRYDEHHQDLTLLKALVRQQLPEKYKEIFFDQSKNGYA |
| | | GYIDGGASQEEFYKFIKPILEKMDGTEELLVKLNREDLLRKQRTFDN |
| | | GSIPHQIHLGELHAILRRQEDFYPFLKDNREKIEKILTFRIPYYVGPLA |
| | | RGNSRFAWMTRKSEETITPWNFEEVVDKGASAQSFIERMTNFDKN |
| | | LPNEKVLPKHSLLYEYFTVYNELTKVKYVTEGMRKPAFLSGEQKKAI |
| | | VDLLFKTNRKVTVKQLKEDYFKKIECFDSVEISGVEDRFNASLGTYH |
| | | DLLKIIKDKDFLDNEENEDILEDIVLTLTLFEDREMIEERLKTYAHLFD |
| | | DKVMKQLKRRRYTGWGRLSRKLINGIRDKQSGKTILDFLKSDGFAN |
| | | RNFMQLIHDDSLTFKEDIQKAQVSGQGDSLHEHIANLAGSPAIKKGI |
| | | LQTVKWDELVKVMGRHKPENIVIEMARENQTTQKGQKNSRERMK |
| | | RIEEGIKELGSQILKEHPVENTQLQNEKLYLYYLQNGRDMYVDQEL |
| | | DINRLSDYDVDHIVPQSFLKDDSIDNKVLTRSDKNRGKSDNVPSEE |
| | | VVKKMKNYWRQLLNAKLITQRKFDNLTKAERGGLSELDKAGFIKRQ |
| | | LVETRQITKHVAQILDSRMNTKYDENDKLIREVKVITLKSKLVSDFRK |
| | | DFQFYKVREINNYHHAHDAYLNAVVGTALIKKYPKLESEFVYGDYK |
| | | VYDVRKMIAKSEQEIGKATAKYFFYSNIMNFFKTEITLANGEIRKRPLI |
| | | ETNGETGEIVWDKGRDFATVRKVLSMPQVNIVKKTEVQTGGFSKE |
| | | SILPKRNSDKLIARKKDWDPKKYGGFVSPTVAYSVLVVAKVEKGKS |
| | | KKLKSVKELLGITIMERSSFEKNPIDFLEAKGYKEVKKDLIIKLPKYSL |
| | | FELENGRKRMLASARELQKGNELALPSKYVNFLYLASHYEKLKGSP |
| | | EDNEQKQLFVEQHKHYLDEIIEQISEFSKRVILADANLDKVLSAYNKH |
| | | RDKPIREQAENIIHLFTLTNLGAPAAFKYFDTTIDRKQYRSTKEVLDA |
| | | TLIHQSITGLYETRIDLSQLGGDEGADKRTADGSEFESPKKKRKV |
| 02. | 1437 | MSEVEFSHEYWMRHALTLAKRARDEREVPVGAVLVLNNRVIGEGW |
| monoABE8.1_bpNLS | | NRAIGLHDPTAHAEIMALRQGGLVMQNYRLIDATLYVTFEPCVMCA |
| + Y147R | | GAMIHSRIGRWFGVRNAKTGAAGSLMDVLHYPGMNHRVEITEGIL |
| polypeptide | | ADECAALLCRFFRMPRQVFNAQKKAQSSTDSGGSSGGSSGSETP |
| sequence | | GTSESATPESSGGSSGGSDKKYSIGLAIGTNSVGWAVITDEYKVPS |
| | | KKFKVLGNTDRHSIKKNLIGALLFDSGETAEATRLKRTARRRYTRRK |
| | | NRICYLQEIFSNEMAKVDDSFFHRLEESFLVEEDKKHERHPIFGNIV |
| | | DEVAYHEKYPTIYHLRKKLVDSTDKADLRLIYLALAHMIKFRGHFLIE |
| | | GDLNPDNSDVDKLFIQLVQTYNQLFEENPINASGVDAKAILSARLSK |
| | | SRRLENLIAQLPGEKKNGLFGNLIALSLGLTPNFKSNFDLAEDAKLQ |
| | | LSKDTYDDDLDNLLAQIGDQYADLFLAAKNLSDAILLSDILRVNTEITK |
| | | APLSASMIKRYDEHHQDLTLLKALVRQQLPEKYKEIFFDQSKNGYA |
| | | GYIDGGASQEEFYKFIKPILEKMDGTEELLVKLNREDLLRKQRTFDN |
| | | GSIPHQIHLGELHAILRRQEDFYPFLKDNREKIEKILTFRIPYYVGPLA |
| | | RGNSRFAWMTRKSEETITPWNFEEVVDKGASAQSFIERMTNFDKN |
| | | LPNEKVLPKHSLLYEYFTVYNELTKVKYVTEGMRKPAFLSGEQKKAI |
| | | VDLLFKTNRKVTVKQLKEDYFKKIECFDSVEISGVEDRFNASLGTYH |
| | | DLLKIIKDKDFLDNEENEDILEDIVLTLTLFEDREMIEERLKTYAHLFD |
| | | DKVMKQLKRRRYTGWGRLSRKLINGIRDKQSGKTILDFLKSDGFAN |
| | | RNFMQLIHDDSLTFKEDIQKAQVSGQGDSLHEHIANLAGSPAIKKGI |
| | | LQTVKWDELVKVMGRHKPENIVIEMARENQTTQKGQKNSRERMK |
| | | RIEEGIKELGSQILKEHPVENTQLQNEKLYLYYLQNGRDMYVDQEL |
| | | DINRLSDYDVDHIVPQSFLKDDSIDNKVLTRSDKNRGKSDNVPSEE |
| | | WKKMKNYWRQLLNAKLITQRKFDNLTKAERGGLSELDKAGFIKRQ |
| | | LVETRQITKHVAQILDSRMNTKYDENDKLIREVKVITLKSKLVSDFRK |
| | | DFQFYKVREINNYHHAHDAYLNAVVGTALIKKYPKLESEFVYGDYK |
| | | VYDVRKMIAKSEQEIGKATAKYFFYSNIMNFFKTEITLANGEIRKRPLI |
| | | ETNGETGEIVWDKGRDFATVRKVLSMPQVNIVKKTEVQTGGFSKE |
| | | SILPKRNSDKLIARKKDWDPKKYGGFVSPTVAYSVLVVAKVEKGKS |
| | | KKLKSVKELLGITIMERSSFEKNPIDFLEAKGYKEVKKDLIIKLPKYSL |
| | | FELENGRKRMLASARELQKGNELALPSKYVNFLYLASHYEKLKGSP |
| | | EDNEQKQLFVEQHKHYLDEIIEQISEFSKRVILADANLDKVLSAYNKH |
| | | RDKPIREQAENIIHLFTLTNLGAPAAFKYFDTTIDRKQYRSTKEVLDA |
| | | TLIHQSITGLYETRIDLSQLGGDEGADKRTADGSEFESPKKKRKV |
| 03. | 1438 | MSEVEFSHEYWMRHALTLAKRARDEREVPVGAVLVLNNRVIGEGW |
| monoABE8.1_bpNLS | | NRAIGLHDPTAHAEIMALRQGGLVMQNYRLIDATLYVTFEPCVMCA |
| + Q154S | | GAMIHSRIGRWFGVRNAKTGAAGSLMDVLHYPGMNHRVEITEGIL |
| polypeptide | | ADECAALLCYFFRMPRSVFNAQKKAQSSTDSGGSSGGSSGSETP |
| sequence | | GTSESATPESSGGSSGGSDKKYSIGLAIGTNSVGWAVITDEYKVPS |
| | | KKFKVLGNTDRHSIKKNLIGALLFDSGETAEATRLKRTARRRYTRRK |
| | | NRICYLQEIFSNEMAKVDDSFFHRLEESFLVEEDKKHERHPIFGNIV |
| | | DEVAYHEKYPTIYHLRKKLVDSTDKADLRLIYLALAHMIKFRGHFLIE |
| | | GDLNPDNSDVDKLFIQLVQTYNQLFEENPINASGVDAKAILSARLSK |
| | | SRRLENLIAQLPGEKKNGLFGNLIALSLGLTPNFKSNFDLAEDAKLQ |
| | | LSKDTYDDDLDNLLAQIGDQYADLFLAAKNLSDAILLSDILRVNTEITK |
| | | APLSASMIKRYDEHHQDLTLLKALVRQQLPEKYKEIFFDQSKNGYA |
| | | GYIDGGASQEEFYKFIKPILEKMDGTEELLVKLNREDLLRKQRTFDN |
| | | GSIPHQIHLGELHAILRRQEDFYPFLKDNREKIEKILTFRIPYYVGPLA |
| | | RGNSRFAWMTRKSEETITPWNFEEVVDKGASAQSFIERMTNFDKN |
| | | LPNEKVLPKHSLLYEYFTVYNELTKVKYVTEGMRKPAFLSGEQKKAI |
| | | VDLLFKTNRKVTVKQLKEDYFKKIECFDSVEISGVEDRFNASLGTYH |
| | | DLLKIIKDKDFLDNEENEDILEDIVLTLTLFEDREMIEERLKTYAHLFD |
| | | DKVMKQLKRRRYTGWGRLSRKLINGIRDKQSGKTILDFLKSDGFAN |
| | | RNFMQLIHDDSLTFKEDIQKAQVSGQGDSLHEHIANLAGSPAIKKGI |
| | | LQTVKWDELVKVMGRHKPENIVIEMARENQTTQKGQKNSRERMK |
| | | RIEEGIKELGSQILKEHPVENTQLQNEKLYLYYLQNGRDMYVDQEL |
| | | DINRLSDYDVDHIVPQSFLKDDSIDNKVLTRSDKNRGKSDNVPSEE |
| | | WKKMKNYWRQLLNAKLITQRKFDNLTKAERGGLSELDKAGFIKRQ |
| | | LVETRQITKHVAQILDSRMNTKYDENDKLIREVKVITLKSKLVSDFRK |
| | | DFQFYKVREINNYHHAHDAYLNAVVGTALIKKYPKLESEFVYGDYK |
| | | VYDVRKMIAKSEQEIGKATAKYFFYSNIMNFFKTEITLANGEIRKRPLI |
| | | ETNGETGEIVWDKGRDFATVRKVLSMPQVNIVKKTEVQTGGFSKE |
| | | SILPKRNSDKLIARKKDWDPKKYGGFVSPTVAYSVLVVAKVEKGKS |
| | | KKLKSVKELLGITIMERSSFEKNPIDFLEAKGYKEVKKDLIIKLPKYSL |
| | | FELENGRKRMLASARELQKGNELALPSKYVNFLYLASHYEKLKGSP |
| | | EDNEQKQLFVEQHKHYLDEIIEQISEFSKRVILADANLDKVLSAYNKH |
| | | RDKPIREQAENIIHLFTLTNLGAPAAFKYFDTTIDRKQYRSTKEVLDA |
| | | TLIHQSITGLYETRIDLSQLGGDEGADKRTADGSEFESPKKKRKV |
| 04. | 1439 | MSEVEFSHEYWMRHALTLAKRARDEREVPVGAVLVLNNRVIGEGW |
| monoABE8.1_bpNLS | | NRAIGLHDPTAHAEIMALRQGGLVMQNYRLIDATLYVTFEPCVMCA |
| + Y123H | | GAMIHSRIGRVVFGVRNAKTGAAGSLMDVLHHPGMNHRVEITEGIL |
| polypeptide | | ADECAALLCYFFRMPRQVFNAQKKAQSSTDSGGSSGGSSGSETP |
| sequence | | GTSESATPESSGGSSGGSDKKYSIGLAIGTNSVGWAVITDEYKVPS |
| | | KKFKVLGNTDRHSIKKNLIGALLFDSGETAEATRLKRTARRRYTRRK |
| | | NRICYLQEIFSNEMAKVDDSFFHRLEESFLVEEDKKHERHPIFGNIV |
| | | DEVAYHEKYPTIYHLRKKLVDSTDKADLRLIYLALAHMIKFRGHFLIE |
| | | GDLNPDNSDVDKLFIQLVQTYNQLFEENPINASGVDAKAILSARLSK |
| | | SRRLENLIAQLPGEKKNGLFGNLIALSLGLTPNFKSNFDLAEDAKLQ |
| | | LSKDTYDDDLDNLLAQIGDQYADLFLAAKNLSDAILLSDILRVNTEITK |
| | | APLSASMIKRYDEHHQDLTLLKALVRQQLPEKYKEIFFDQSKNGYA |
| | | GYIDGGASQEEFYKFIKPILEKMDGTEELLVKLNREDLLRKQRTFDN |
| | | GSIPHQIHLGELHAILRRQEDFYPFLKDNREKIEKILTFRIPYYVGPLA |
| | | RGNSRFAWMTRKSEETITPWNFEEVVDKGASAQSFIERMTNFDKN |
| | | LPNEKVLPKHSLLYEYFTVYNELTKVKYVTEGMRKPAFLSGEQKKAI |
| | | VDLLFKTNRKVTVKQLKEDYFKKIECFDSVEISGVEDRFNASLGTYH |
| | | DLLKIIKDKDFLDNEENEDILEDIVLTLTLFEDREMIEERLKTYAHLFD |
| | | DKVMKQLKRRRYTGWGRLSRKLINGIRDKQSGKTILDFLKSDGFAN |
| | | RNFMQLIHDDSLTFKEDIQKAQVSGQGDSLHEHIANLAGSPAIKKGI |
| | | LQTVKWDELVKVMGRHKPENIVIEMARENQTTQKGQKNSRERMK |
| | | RIEEGIKELGSQILKEHPVENTQLQNEKLYLYYLQNGRDMYVDQEL |
| | | DINRLSDYDVDHIVPQSFLKDDSIDNKVLTRSDKNRGKSDNVPSEE |
| | | WKKMKNYWRQLLNAKLITQRKFDNLTKAERGGLSELDKAGFIKRQ |
| | | LVETRQITKHVAQILDSRMNTKYDENDKLIREVKVITLKSKLVSDFRK |
| | | DFQFYKVREINNYHHAHDAYLNAVVGTALIKKYPKLESEFVYGDYK |
| | | VYDVRKMIAKSEQEIGKATAKYFFYSNIMNFFKTEITLANGEIRKRPLI |
| | | ETNGETGEIVWDKGRDFATVRKVLSMPQVNIVKKTEVQTGGFSKE |
| | | SILPKRNSDKLIARKKDWDPKKYGGFVSPTVAYSVLVVAKVEKGKS |
| | | KKLKSVKELLGITIMERSSFEKNPIDFLEAKGYKEVKKDLIIKLPKYSL |
| | | FELENGRKRMLASARELQKGNELALPSKYVNFLYLASHYEKLKGSP |
| | | EDNEQKQLFVEQHKHYLDEIIEQISEFSKRVILADANLDKVLSAYNKH |
| | | RDKPIREQAENIIHLFTLTNLGAPAAFKYFDTTIDRKQYRSTKEVLDA |
| | | TLIHQSITGLYETRIDLSQLGGDEGADKRTADGSEFESPKKKRKV |
| 05. | 1440 | MSEVEFSHEYWMRHALTLAKRARDEREVPVGAVLVLNNRVIGEGW |
| monoABE8.1_bpNLS | | NRAIGLHDPTAHAEIMALRQGGLVMQNYRLIDATLYSTFEPCVMCA |
| + V82S | | GAMIHSRIGRWFGVRNAKTGAAGSLMDVLHYPGMNHRVEITEGIL |
| polypeptide | | ADECAALLCYFFRMPRQVFNAQKKAQSSTDSGGSSGGSSGSETP |
| sequence | | GTSESATPESSGGSSGGSDKKYSIGLAIGTNSVGWAVITDEYKVPS |
| | | KKFKVLGNTDRHSIKKNLIGALLFDSGETAEATRLKRTARRRYTRRK |
| | | NRICYLQEIFSNEMAKVDDSFFHRLEESFLVEEDKKHERHPIFGNIV |
| | | DEVAYHEKYPTIYHLRKKLVDSTDKADLRLIYLALAHMIKFRGHFLIE |
| | | GDLNPDNSDVDKLFIQLVQTYNQLFEENPINASGVDAKAILSARLSK |
| | | SRRLENLIAQLPGEKKNGLFGNLIALSLGLTPNFKSNFDLAEDAKLQ |
| | | LSKDTYDDDLDNLLAQIGDQYADLFLAAKNLSDAILLSDILRVNTEITK |
| | | APLSASMIKRYDEHHQDLTLLKALVRQQLPEKYKEIFFDQSKNGYA |
| | | GYIDGGASQEEFYKFIKPILEKMDGTEELLVKLNREDLLRKQRTFDN |
| | | GSIPHQIHLGELHAILRRQEDFYPFLKDNREKIEKILTFRIPYYVGPLA |
| | | RGNSRFAWMTRKSEETITPWNFEEVVDKGASAQSFIERMTNFDKN |
| | | LPNEKVLPKHSLLYEYFTVYNELTKVKYVTEGMRKPAFLSGEQKKAI |
| | | VDLLFKTNRKVTVKQLKEDYFKKIECFDSVEISGVEDRFNASLGTYH |
| | | DLLKIIKDKDFLDNEENEDILEDIVLTLTLFEDREMIEERLKTYAHLFD |
| | | DKVMKQLKRRRYTGWGRLSRKLINGIRDKQSGKTILDFLKSDGFAN |
| | | RNFMQLIHDDSLTFKEDIQKAQVSGQGDSLHEHIANLAGSPAIKKGI |
| | | LQTVKWDELVKVMGRHKPENIVIEMARENQTTQKGQKNSRERMK |
| | | RIEEGIKELGSQILKEHPVENTQLQNEKLYLYYLQNGRDMYVDQEL |
| | | DINRLSDYDVDHIVPQSFLKDDSIDNKVLTRSDKNRGKSDNVPSEE |
| | | WKKMKNYWRQLLNAKLITQRKFDNLTKAERGGLSELDKAGFIKRQ |
| | | LVETRQITKHVAQILDSRMNTKYDENDKLIREVKVITLKSKLVSDFRK |
| | | DFQFYKVREINNYHHAHDAYLNAVVGTALIKKYPKLESEFVYGDYK |
| | | VYDVRKMIAKSEQEIGKATAKYFFYSNIMNFFKTEITLANGEIRKRPLI |
| | | ETNGETGEIVWDKGRDFATVRKVLSMPQVNIVKKTEVQTGGFSKE |
| | | SILPKRNSDKLIARKKDWDPKKYGGFVSPTVAYSVLVVAKVEKGKS |
| | | KKLKSVKELLGITIMERSSFEKNPIDFLEAKGYKEVKKDLIIKLPKYSL |
| | | FELENGRKRMLASARELQKGNELALPSKYVNFLYLASHYEKLKGSP |
| | | EDNEQKQLFVEQHKHYLDEIIEQISEFSKRVILADANLDKVLSAYNKH |
| | | RDKPIREQAENIIHLFTLTNLGAPAAFKYFDTTIDRKQYRSTKEVLDA |
| | | TLIHQSITGLYETRIDLSQLGGDEGADKRTADGSEFESPKKKRKV |
| 06. | 1441 | MSEVEFSHEYWMRHALTLAKRARDEREVPVGAVLVLNNRVIGEGW |
| monoABE8.1_bpNLS | | NRAIGLHDPTAHAEIMALRQGGLVMQNYRLIDATLYVTFEPCVMCA |
| + T166R | | GAMIHSRIGRWFGVRNAKTGAAGSLMDVLHYPGMNHRVEITEGIL |
| polypeptide | | ADECAALLCYFFRMPRQVFNAQKKAQSSRDSGGSSGGSSGSETP |
| sequence | | GTSESATPESSGGSSGGSDKKYSIGLAIGTNSVGWAVITDEYKVPS |
| | | KKFKVLGNTDRHSIKKNLIGALLFDSGETAEATRLKRTARRRYTRRK |
| | | NRICYLQEIFSNEMAKVDDSFFHRLEESFLVEEDKKHERHPIFGNIV |
| | | DEVAYHEKYPTIYHLRKKLVDSTDKADLRLIYLALAHMIKFRGHFLIE |
| | | GDLNPDNSDVDKLFIQLVQTYNQLFEENPINASGVDAKAILSARLSK |
| | | SRRLENLIAQLPGEKKNGLFGNLIALSLGLTPNFKSNFDLAEDAKLQ |
| | | LSKDTYDDDLDNLLAQIGDQYADLFLAAKNLSDAILLSDILRVNTEITK |
| | | APLSASMIKRYDEHHQDLTLLKALVRQQLPEKYKEIFFDQSKNGYA |
| | | GYIDGGASQEEFYKFIKPILEKMDGTEELLVKLNREDLLRKQRTFDN |
| | | GSIPHQIHLGELHAILRRQEDFYPFLKDNREKIEKILTFRIPYYVGPLA |
| | | RGNSRFAWMTRKSEETITPWNFEEVVDKGASAQSFIERMTNFDKN |
| | | LPNEKVLPKHSLLYEYFTVYNELTKVKYVTEGMRKPAFLSGEQKKAI |
| | | VDLLFKTNRKVTVKQLKEDYFKKIECFDSVEISGVEDRFNASLGTYH |
| | | DLLKIIKDKDFLDNEENEDILEDIVLTLTLFEDREMIEERLKTYAHLFD |
| | | DKVMKQLKRRRYTGWGRLSRKLINGIRDKQSGKTILDFLKSDGFAN |
| | | RNFMQLIHDDSLTFKEDIQKAQVSGQGDSLHEHIANLAGSPAIKKGI |
| | | LQTVKWDELVKVMGRHKPENIVIEMARENQTTQKGQKNSRERMK |
| | | RIEEGIKELGSQILKEHPVENTQLQNEKLYLYYLQNGRDMYVDQEL |
| | | DINRLSDYDVDHIVPQSFLKDDSIDNKVLTRSDKNRGKSDNVPSEE |
| | | VVKKMKNYWRQLLNAKLITQRKFDNLTKAERGGLSELDKAGFIKRQ |
| | | LVETRQITKHVAQILDSRMNTKYDENDKLIREVKVITLKSKLVSDFRK |
| | | DFQFYKVREINNYHHAHDAYLNAVVGTALIKKYPKLESEFVYGDYK |
| | | VYDVRKMIAKSEQEIGKATAKYFFYSNIMNFFKTEITLANGEIRKRPLI |
| | | ETNGETGEIVWDKGRDFATVRKVLSMPQVNIVKKTEVQTGGFSKE |
| | | SILPKRNSDKLIARKKDWDPKKYGGFVSPTVAYSVLVVAKVEKGKS |
| | | KKLKSVKELLGITIMERSSFEKNPIDFLEAKGYKEVKKDLIIKLPKYSL |
| | | FELENGRKRMLASARELQKGNELALPSKYVNFLYLASHYEKLKGSP |
| | | EDNEQKQLFVEQHKHYLDEIIEQISEFSKRVILADANLDKVLSAYNKH |
| | | RDKPIREQAENIIHLFTLTNLGAPAAFKYFDTTIDRKQYRSTKEVLDA |
| | | TLIHQSITGLYETRIDLSQLGGDEGADKRTADGSEFESPKKKRKV |
| 07. | 1442 | MSEVEFSHEYWMRHALTLAKRARDEREVPVGAVLVLNNRVIGEGW |
| monoABE8.1_bpNLS | | NRAIGLHDPTAHAEIMALRQGGLVMQNYRLIDATLYVTFEPCVMCA |
| + Q154R | | GAMIHSRIGRWFGVRNAKTGAAGSLMDVLHYPGMNHRVEITEGIL |
| polypeptide | | ADECAALLCYFFRMPRRVFNAQKKAQSSTDSGGSSGGSSGSETP |
| sequence | | GTSESATPESSGGSSGGSDKKYSIGLAIGTNSVGWAVITDEYKVPS |
| | | KKFKVLGNTDRHSIKKNLIGALLFDSGETAEATRLKRTARRRYTRRK |
| | | NRICYLQEIFSNEMAKVDDSFFHRLEESFLVEEDKKHERHPIFGNIV |
| | | DEVAYHEKYPTIYHLRKKLVDSTDKADLRLIYLALAHMIKFRGHFLIE |
| | | GDLNPDNSDVDKLFIQLVQTYNQLFEENPINASGVDAKAILSARLSK |
| | | SRRLENLIAQLPGEKKNGLFGNLIALSLGLTPNFKSNFDLAEDAKLQ |
| | | LSKDTYDDDLDNLLAQIGDQYADLFLAAKNLSDAILLSDILRVNTEITK |
| | | APLSASMIKRYDEHHQDLTLLKALVRQQLPEKYKEIFFDQSKNGYA |
| | | GYIDGGASQEEFYKFIKPILEKMDGTEELLVKLNREDLLRKQRTFDN |
| | | GSIPHQIHLGELHAILRRQEDFYPFLKDNREKIEKILTFRIPYYVGPLA |
| | | RGNSRFAWMTRKSEETITPWNFEEVVDKGASAQSFIERMTNFDKN |
| | | LPNEKVLPKHSLLYEYFTVYNELTKVKYVTEGMRKPAFLSGEQKKAI |
| | | VDLLFKTNRKVTVKQLKEDYFKKIECFDSVEISGVEDRFNASLGTYH |
| | | DLLKIIKDKDFLDNEENEDILEDIVLTLTLFEDREMIEERLKTYAHLFD |
| | | DKVMKQLKRRRYTGWGRLSRKLINGIRDKQSGKTILDFLKSDGFAN |
| | | RNFMQLIHDDSLTFKEDIQKAQVSGQGDSLHEHIANLAGSPAIKKGI |
| | | LQTVKWDELVKVMGRHKPENIVIEMARENQTTQKGQKNSRERMK |
| | | RIEEGIKELGSQILKEHPVENTQLQNEKLYLYYLQNGRDMYVDQEL |
| | | DINRLSDYDVDHIVPQSFLKDDSIDNKVLTRSDKNRGKSDNVPSEE |
| | | WKKMKNYWRQLLNAKLITQRKFDNLTKAERGGLSELDKAGFIKRQ |
| | | LVETRQITKHVAQILDSRMNTKYDENDKLIREVKVITLKSKLVSDFRK |
| | | DFQFYKVREINNYHHAHDAYLNAVVGTALIKKYPKLESEFVYGDYK |
| | | VYDVRKMIAKSEQEIGKATAKYFFYSNIMNFFKTEITLANGEIRKRPLI |
| | | ETNGETGEIVWDKGRDFATVRKVLSMPQVNIVKKTEVQTGGFSKE |
| | | SILPKRNSDKLIARKKDWDPKKYGGFVSPTVAYSVLVVAKVEKGKS |
| | | KKLKSVKELLGITIMERSSFEKNPIDFLEAKGYKEVKKDLIIKLPKYSL |
| | | FELENGRKRMLASARELQKGNELALPSKYVNFLYLASHYEKLKGSP |
| | | EDNEQKQLFVEQHKHYLDEIIEQISEFSKRVILADANLDKVLSAYNKH |
| | | RDKPIREQAENIIHLFTLTNLGAPAAFKYFDTTIDRKQYRSTKEVLDA |
| | | TLIHQSITGLYETRIDLSQLGGDEGADKRTADGSEFESPKKKRKV |
| 08. | 1443 | MSEVEFSHEYWMRHALTLAKRARDEREVPVGAVLVLNNRVIGEGW |
| monoABE8.1_bpNLS | | NRAIGLHDPTAHAEIMALRQGGLVMQNYRLIDATLYVTFEPCVMCA |
| + Y147R_Q154R_ | | GAMIHSRIGRVVFGVRNAKTGAAGSLMDVLHHPGMNHRVEITEGIL |
| Y123H polypeptide | | ADECAALLCRFFRMPRRVFNAQKKAQSSTDSGGSSGGSSGSETP |
| sequence | | GTSESATPESSGGSSGGSDKKYSIGLAIGTNSVGWAVITDEYKVPS |
| | | KKFKVLGNTDRHSIKKNLIGALLFDSGETAEATRLKRTARRRYTRRK |
| | | NRICYLQEIFSNEMAKVDDSFFHRLEESFLVEEDKKHERHPIFGNIV |
| | | DEVAYHEKYPTIYHLRKKLVDSTDKADLRLIYLALAHMIKFRGHFLIE |
| | | GDLNPDNSDVDKLFIQLVQTYNQLFEENPINASGVDAKAILSARLSK |
| | | SRRLENLIAQLPGEKKNGLFGNLIALSLGLTPNFKSNFDLAEDAKLQ |
| | | LSKDTYDDDLDNLLAQIGDQYADLFLAAKNLSDAILLSDILRVNTEITK |
| | | APLSASMIKRYDEHHQDLTLLKALVRQQLPEKYKEIFFDQSKNGYA |
| | | GYIDGGASQEEFYKFIKPILEKMDGTEELLVKLNREDLLRKQRTFDN |
| | | GSIPHQIHLGELHAILRRQEDFYPFLKDNREKIEKILTFRIPYYVGPLA |
| | | RGNSRFAWMTRKSEETITPWNFEEVVDKGASAQSFIERMTNFDKN |
| | | LPNEKVLPKHSLLYEYFTVYNELTKVKYVTEGMRKPAFLSGEQKKAI |
| | | VDLLFKTNRKVTVKQLKEDYFKKIECFDSVEISGVEDRFNASLGTYH |
| | | DLLKIIKDKDFLDNEENEDILEDIVLTLTLFEDREMIEERLKTYAHLFD |
| | | DKVMKQLKRRRYTGWGRLSRKLINGIRDKQSGKTILDFLKSDGFAN |
| | | RNFMQLIHDDSLTFKEDIQKAQVSGQGDSLHEHIANLAGSPAIKKGI |
| | | LQTVKWDELVKVMGRHKPENIVIEMARENQTTQKGQKNSRERMK |
| | | RIEEGIKELGSQILKEHPVENTQLQNEKLYLYYLQNGRDMYVDQEL |
| | | DINRLSDYDVDHIVPQSFLKDDSIDNKVLTRSDKNRGKSDNVPSEE |
| | | WKKMKNYWRQLLNAKLITQRKFDNLTKAERGGLSELDKAGFIKRQ |
| | | LVETRQITKHVAQILDSRMNTKYDENDKLIREVKVITLKSKLVSDFRK |
| | | DFQFYKVREINNYHHAHDAYLNAVVGTALIKKYPKLESEFVYGDYK |
| | | VYDVRKMIAKSEQEIGKATAKYFFYSNIMNFFKTEITLANGEIRKRPLI |
| | | ETNGETGEIVWDKGRDFATVRKVLSMPQVNIVKKTEVQTGGFSKE |
| | | SILPKRNSDKLIARKKDWDPKKYGGFVSPTVAYSVLVVAKVEKGKS |
| | | KKLKSVKELLGITIMERSSFEKNPIDFLEAKGYKEVKKDLIIKLPKYSL |
| | | FELENGRKRMLASARELQKGNELALPSKYVNFLYLASHYEKLKGSP |
| | | EDNEQKQLFVEQHKHYLDEIIEQISEFSKRVILADANLDKVLSAYNKH |
| | | RDKPIREQAENIIHLFTLTNLGAPAAFKYFDTTIDRKQYRSTKEVLDA |
| | | TLIHQSITGLYETRIDLSQLGGDEGADKRTADGSEFESPKKKRKV |
| 09. | 1444 | MSEVEFSHEYWMRHALTLAKRARDEREVPVGAVLVLNNRVIGEGW |
| monoABE8.1_bpNLS | | NRAIGLHDPTAHAEIMALRQGGLVMQNYRLYDATLYVTFEPCVMCA |
| + Y147R_Q154R_ | | GAMIHSRIGRWFGVRNAKTGAAGSLMDVLHYPGMNHRVEITEGIL |
| I76Y polypeptide | | ADECAALLCRFFRMPRRVFNAQKKAQSSTDSGGSSGGSSGSETP |
| sequence | | GTSESATPESSGGSSGGSDKKYSIGLAIGTNSVGWAVITDEYKVPS |
| | | KKFKVLGNTDRHSIKKNLIGALLFDSGETAEATRLKRTARRRYTRRK |
| | | NRICYLQEIFSNEMAKVDDSFFHRLEESFLVEEDKKHERHPIFGNIV |
| | | DEVAYHEKYPTIYHLRKKLVDSTDKADLRLIYLALAHMIKFRGHFLIE |
| | | GDLNPDNSDVDKLFIQLVQTYNQLFEENPINASGVDAKAILSARLSK |
| | | SRRLENLIAQLPGEKKNGLFGNLIALSLGLTPNFKSNFDLAEDAKLQ |
| | | LSKDTYDDDLDNLLAQIGDQYADLFLAAKNLSDAILLSDILRVNTEITK |
| | | APLSASMIKRYDEHHQDLTLLKALVRQQLPEKYKEIFFDQSKNGYA |
| | | GYIDGGASQEEFYKFIKPILEKMDGTEELLVKLNREDLLRKQRTFDN |
| | | GSIPHQIHLGELHAILRRQEDFYPFLKDNREKIEKILTFRIPYYVGPLA |
| | | RGNSRFAWMTRKSEETITPWNFEEVVDKGASAQSFIERMTNFDKN |
| | | LPNEKVLPKHSLLYEYFTVYNELTKVKYVTEGMRKPAFLSGEQKKAI |
| | | VDLLFKTNRKVTVKQLKEDYFKKIECFDSVEISGVEDRFNASLGTYH |
| | | DLLKIIKDKDFLDNEENEDILEDIVLTLTLFEDREMIEERLKTYAHLFD |
| | | DKVMKQLKRRRYTGWGRLSRKLINGIRDKQSGKTILDFLKSDGFAN |
| | | RNFMQLIHDDSLTFKEDIQKAQVSGQGDSLHEHIANLAGSPAIKKGI |
| | | LQTVKWDELVKVMGRHKPENIVIEMARENQTTQKGQKNSRERMK |
| | | RIEEGIKELGSQILKEHPVENTQLQNEKLYLYYLQNGRDMYVDQEL |
| | | DINRLSDYDVDHIVPQSFLKDDSIDNKVLTRSDKNRGKSDNVPSEE |
| | | WKKMKNYWRQLLNAKLITQRKFDNLTKAERGGLSELDKAGFIKRQ |
| | | LVETRQITKHVAQILDSRMNTKYDENDKLIREVKVITLKSKLVSDFRK |
| | | DFQFYKVREINNYHHAHDAYLNAVVGTALIKKYPKLESEFVYGDYK |
| | | VYDVRKMIAKSEQEIGKATAKYFFYSNIMNFFKTEITLANGEIRKRPLI |
| | | ETNGETGEIVWDKGRDFATVRKVLSMPQVNIVKKTEVQTGGFSKE |
| | | SILPKRNSDKLIARKKDWDPKKYGGFVSPTVAYSVLVVAKVEKGKS |
| | | KKLKSVKELLGITIMERSSFEKNPIDFLEAKGYKEVKKDLIIKLPKYSL |
| | | FELENGRKRMLASARELQKGNELALPSKYVNFLYLASHYEKLKGSP |
| | | EDNEQKQLFVEQHKHYLDEIIEQISEFSKRVILADANLDKVLSAYNKH |
| | | RDKPIREQAENIIHLFTLTNLGAPAAFKYFDTTIDRKQYRSTKEVLDA |
| | | TLIHQSITGLYETRIDLSQLGGDEGADKRTADGSEFESPKKKRKV |
| 10. | 1445 | MSEVEFSHEYWMRHALTLAKRARDEREVPVGAVLVLNNRVIGEGW |
| monoABE8.1_bpNLS | | NRAIGLHDPTAHAEIMALRQGGLVMQNYRLIDATLYVTFEPCVMCA |
| + | | GAMIHSRIGRWFGVRNAKTGAAGSLMDVLHYPGMNHRVEITEGIL |
| Y147R_Q154R_ | | ADECAALLCRFFRMPRRVFNAQKKAQSSRDSGGSSGGSSGSETP |
| T166R polypeptide | | GTSESATPESSGGSSGGSDKKYSIGLAIGTNSVGWAVITDEYKVPS |
| sequence | | KKFKVLGNTDRHSIKKNLIGALLFDSGETAEATRLKRTARRRYTRRK |
| | | NRICYLQEIFSNEMAKVDDSFFHRLEESFLVEEDKKHERHPIFGNIV |
| | | DEVAYHEKYPTIYHLRKKLVDSTDKADLRLIYLALAHMIKFRGHFLIE |
| | | GDLNPDNSDVDKLFIQLVQTYNQLFEENPINASGVDAKAILSARLSK |
| | | SRRLENLIAQLPGEKKNGLFGNLIALSLGLTPNFKSNFDLAEDAKLQ |
| | | LSKDTYDDDLDNLLAQIGDQYADLFLAAKNLSDAILLSDILRVNTEITK |
| | | APLSASMIKRYDEHHQDLTLLKALVRQQLPEKYKEIFFDQSKNGYA |
| | | GYIDGGASQEEFYKFIKPILEKMDGTEELLVKLNREDLLRKQRTFDN |
| | | GSIPHQIHLGELHAILRRQEDFYPFLKDNREKIEKILTFRIPYYVGPLA |
| | | RGNSRFAWMTRKSEETITPWNFEEVVDKGASAQSFIERMTNFDKN |
| | | LPNEKVLPKHSLLYEYFTVYNELTKVKYVTEGMRKPAFLSGEQKKAI |
| | | VDLLFKTNRKVTVKQLKEDYFKKIECFDSVEISGVEDRFNASLGTYH |
| | | DLLKIIKDKDFLDNEENEDILEDIVLTLTLFEDREMIEERLKTYAHLFD |
| | | DKVMKQLKRRRYTGWGRLSRKLINGIRDKQSGKTILDFLKSDGFAN |
| | | RNFMQLIHDDSLTFKEDIQKAQVSGQGDSLHEHIANLAGSPAIKKGI |
| | | LQTVKWDELVKVMGRHKPENIVIEMARENQTTQKGQKNSRERMK |
| | | RIEEGIKELGSQILKEHPVENTQLQNEKLYLYYLQNGRDMYVDQEL |
| | | DINRLSDYDVDHIVPQSFLKDDSIDNKVLTRSDKNRGKSDNVPSEE |
| | | WKKMKNYWRQLLNAKLITQRKFDNLTKAERGGLSELDKAGFIKRQ |
| | | LVETRQITKHVAQILDSRMNTKYDENDKLIREVKVITLKSKLVSDFRK |
| | | DFQFYKVREINNYHHAHDAYLNAVVGTALIKKYPKLESEFVYGDYK |
| | | VYDVRKMIAKSEQEIGKATAKYFFYSNIMNFFKTEITLANGEIRKRPLI |
| | | ETNGETGEIVWDKGRDFATVRKVLSMPQVNIVKKTEVQTGGFSKE |
| | | SILPKRNSDKLIARKKDWDPKKYGGFVSPTVAYSVLVVAKVEKGKS |
| | | KKLKSVKELLGITIMERSSFEKNPIDFLEAKGYKEVKKDLIIKLPKYSL |
| | | FELENGRKRMLASARELQKGNELALPSKYVNFLYLASHYEKLKGSP |
| | | EDNEQKQLFVEQHKHYLDEIIEQISEFSKRVILADANLDKVLSAYNKH |
| | | RDKPIREQAENIIHLFTLTNLGAPAAFKYFDTTIDRKQYRSTKEVLDA |
| | | TLIHQSITGLYETRIDLSQLGGDEGADKRTADGSEFESPKKKRKV |
| 11. | 1446 | MSEVEFSHEYWMRHALTLAKRARDEREVPVGAVLVLNNRVIGEGW |
| monoABE8.1_bpNLS | | NRAIGLHDPTAHAEIMALRQGGLVMQNYRLIDATLYVTFEPCVMCA |
| + | | GAMIHSRIGRWFGVRNAKTGAAGSLMDVLHYPGMNHRVEITEGIL |
| Y147T_Q154R | | ADECAALLCTFFRMPRRVFNAQKKAQSSTDSGGSSGGSSGSETP |
| polypeptide | | GTSESATPESSGGSSGGSDKKYSIGLAIGTNSVGWAVITDEYKVPS |
| sequence | | KKFKVLGNTDRHSIKKNLIGALLFDSGETAEATRLKRTARRRYTRRK |
| | | NRICYLQEIFSNEMAKVDDSFFHRLEESFLVEEDKKHERHPIFGNIV |
| | | DEVAYHEKYPTIYHLRKKLVDSTDKADLRLIYLALAHMIKFRGHFLIE |
| | | GDLNPDNSDVDKLFIQLVQTYNQLFEENPINASGVDAKAILSARLSK |
| | | SRRLENLIAQLPGEKKNGLFGNLIALSLGLTPNFKSNFDLAEDAKLQ |
| | | LSKDTYDDDLDNLLAQIGDQYADLFLAAKNLSDAILLSDILRVNTEITK |
| | | APLSASMIKRYDEHHQDLTLLKALVRQQLPEKYKEIFFDQSKNGYA |
| | | GYIDGGASQEEFYKFIKPILEKMDGTEELLVKLNREDLLRKQRTFDN |
| | | GSIPHQIHLGELHAILRRQEDFYPFLKDNREKIEKILTFRIPYYVGPLA |
| | | RGNSRFAWMTRKSEETITPWNFEEVVDKGASAQSFIERMTNFDKN |
| | | LPNEKVLPKHSLLYEYFTVYNELTKVKYVTEGMRKPAFLSGEQKKAI |
| | | VDLLFKTNRKVTVKQLKEDYFKKIECFDSVEISGVEDRFNASLGTYH |
| | | DLLKIIKDKDFLDNEENEDILEDIVLTLTLFEDREMIEERLKTYAHLFD |
| | | DKVMKQLKRRRYTGWGRLSRKLINGIRDKQSGKTILDFLKSDGFAN |
| | | RNFMQLIHDDSLTFKEDIQKAQVSGQGDSLHEHIANLAGSPAIKKGI |
| | | LQTVKWDELVKVMGRHKPENIVIEMARENQTTQKGQKNSRERMK |
| | | RIEEGIKELGSQILKEHPVENTQLQNEKLYLYYLQNGRDMYVDQEL |
| | | DINRLSDYDVDHIVPQSFLKDDSIDNKVLTRSDKNRGKSDNVPSEE |
| | | VVKKMKNYWRQLLNAKLITQRKFDNLTKAERGGLSELDKAGFIKRQ |
| | | LVETRQITKHVAQILDSRMNTKYDENDKLIREVKVITLKSKLVSDFRK |
| | | DFQFYKVREINNYHHAHDAYLNAVVGTALIKKYPKLESEFVYGDYK |
| | | VYDVRKMIAKSEQEIGKATAKYFFYSNIMNFFKTEITLANGEIRKRPLI |
| | | ETNGETGEIVWDKGRDFATVRKVLSMPQVNIVKKTEVQTGGFSKE |
| | | SILPKRNSDKLIARKKDWDPKKYGGFVSPTVAYSVLVVAKVEKGKS |
| | | KKLKSVKELLGITIMERSSFEKNPIDFLEAKGYKEVKKDLIIKLPKYSL |
| | | FELENGRKRMLASARELQKGNELALPSKYVNFLYLASHYEKLKGSP |
| | | EDNEQKQLFVEQHKHYLDEIIEQISEFSKRVILADANLDKVLSAYNKH |
| | | RDKPIREQAENIIHLFTLTNLGAPAAFKYFDTTIDRKQYRSTKEVLDA |
| | | TLIHQSITGLYETRIDLSQLGGDEGADKRTADGSEFESPKKKRKV |
| 12. | 1447 | MSEVEFSHEYWMRHALTLAKRARDEREVPVGAVLVLNNRVIGEGW |
| monoABE8.1_bpNLS | | NRAIGLHDPTAHAEIMALRQGGLVMQNYRLIDATLYVTFEPCVMCA |
| + | | GAMIHSRIGRWFGVRNAKTGAAGSLMDVLHYPGMNHRVEITEGIL |
| Y147T_Q154S | | ADECAALLCTFFRMPRSVFNAQKKAQSSTDSGGSSGGSSGSETP |
| polypeptide | | GTSESATPESSGGSSGGSDKKYSIGLAIGTNSVGWAVITDEYKVPS |
| sequence | | KKFKVLGNTDRHSIKKNLIGALLFDSGETAEATRLKRTARRRYTRRK |
| | | NRICYLQEIFSNEMAKVDDSFFHRLEESFLVEEDKKHERHPIFGNIV |
| | | DEVAYHEKYPTIYHLRKKLVDSTDKADLRLIYLALAHMIKFRGHFLIE |
| | | GDLNPDNSDVDKLFIQLVQTYNQLFEENPINASGVDAKAILSARLSK |
| | | SRRLENLIAQLPGEKKNGLFGNLIALSLGLTPNFKSNFDLAEDAKLQ |
| | | LSKDTYDDDLDNLLAQIGDQYADLFLAAKNLSDAILLSDILRVNTEITK |
| | | APLSASMIKRYDEHHQDLTLLKALVRQQLPEKYKEIFFDQSKNGYA |
| | | GYIDGGASQEEFYKFIKPILEKMDGTEELLVKLNREDLLRKQRTFDN |
| | | GSIPHQIHLGELHAILRRQEDFYPFLKDNREKIEKILTFRIPYYVGPLA |
| | | RGNSRFAWMTRKSEETITPWNFEEVVDKGASAQSFIERMTNFDKN |
| | | LPNEKVLPKHSLLYEYFTVYNELTKVKYVTEGMRKPAFLSGEQKKAI |
| | | VDLLFKTNRKVTVKQLKEDYFKKIECFDSVEISGVEDRFNASLGTYH |
| | | DLLKIIKDKDFLDNEENEDILEDIVLTLTLFEDREMIEERLKTYAHLFD |
| | | DKVMKQLKRRRYTGWGRLSRKLINGIRDKQSGKTILDFLKSDGFAN |
| | | RNFMQLIHDDSLTFKEDIQKAQVSGQGDSLHEHIANLAGSPAIKKGI |
| | | LQTVKWDELVKVMGRHKPENIVIEMARENQTTQKGQKNSRERMK |
| | | RIEEGIKELGSQILKEHPVENTQLQNEKLYLYYLQNGRDMYVDQEL |
| | | DINRLSDYDVDHIVPQSFLKDDSIDNKVLTRSDKNRGKSDNVPSEE |
| | | WKKMKNYWRQLLNAKLITQRKFDNLTKAERGGLSELDKAGFIKRQ |
| | | LVETRQITKHVAQILDSRMNTKYDENDKLIREVKVITLKSKLVSDFRK |
| | | DFQFYKVREINNYHHAHDAYLNAVVGTALIKKYPKLESEFVYGDYK |
| | | VYDVRKMIAKSEQEIGKATAKYFFYSNIMNFFKTEITLANGEIRKRPLI |
| | | ETNGETGEIVWDKGRDFATVRKVLSMPQVNIVKKTEVQTGGFSKE |
| | | SILPKRNSDKLIARKKDWDPKKYGGFVSPTVAYSVLVVAKVEKGKS |
| | | KKLKSVKELLGITIMERSSFEKNPIDFLEAKGYKEVKKDLIIKLPKYSL |
| | | FELENGRKRMLASARELQKGNELALPSKYVNFLYLASHYEKLKGSP |
| | | EDNEQKQLFVEQHKHYLDEIIEQISEFSKRVILADANLDKVLSAYNKH |
| | | RDKPIREQAENIIHLFTLTNLGAPAAFKYFDTTIDRKQYRSTKEVLDA |
| | | TLIHQSITGLYETRIDLSQLGGDEGADKRTADGSEFESPKKKRKV |
| 13. | 1448 | MSEVEFSHEYWMRHALTLAKRARDEREVPVGAVLVLNNRVIGEGW |
| monoABE8.1_ | | NRAIGLHDPTAHAEIMALRQGGLVMQNYRLYDATLYVTFEPCVMCA |
| bpNLS + | | GAMIHSRIGRVVFGVRNAKTGAAGSLMDVLHHPGMNHRVEITEGIL |
| H123Y123H_Y147R_ | | ADECAALLCRFFRMPRRVFNAQKKAQSSTDSGGSSGGSSGSETP |
| Q154R_I76Y | | GTSESATPESSGGSSGGSDKKYSIGLAIGTNSVGWAVITDEYKVPS |
| polypeptide | | KKFKVLGNTDRHSIKKNLIGALLFDSGETAEATRLKRTARRRYTRRK |
| sequence | | NRICYLQEIFSNEMAKVDDSFFHRLEESFLVEEDKKHERHPIFGNIV |
| | | DEVAYHEKYPTIYHLRKKLVDSTDKADLRLIYLALAHMIKFRGHFLIE |
| | | GDLNPDNSDVDKLFIQLVQTYNQLFEENPINASGVDAKAILSARLSK |
| | | SRRLENLIAQLPGEKKNGLFGNLIALSLGLTPNFKSNFDLAEDAKLQ |
| | | LSKDTYDDDLDNLLAQIGDQYADLFLAAKNLSDAILLSDILRVNTEITK |
| | | APLSASMIKRYDEHHQDLTLLKALVRQQLPEKYKEIFFDQSKNGYA |
| | | GYIDGGASQEEFYKFIKPILEKMDGTEELLVKLNREDLLRKQRTFDN |
| | | GSIPHQIHLGELHAILRRQEDFYPFLKDNREKIEKILTFRIPYYVGPLA |
| | | RGNSRFAWMTRKSEETITPWNFEEVVDKGASAQSFIERMTNFDKN |
| | | LPNEKVLPKHSLLYEYFTVYNELTKVKYVTEGMRKPAFLSGEQKKAI |
| | | VDLLFKTNRKVTVKQLKEDYFKKIECFDSVEISGVEDRFNASLGTYH |
| | | DLLKIIKDKDFLDNEENEDILEDIVLTLTLFEDREMIEERLKTYAHLFD |
| | | DKVMKQLKRRRYTGWGRLSRKLINGIRDKQSGKTILDFLKSDGFAN |
| | | RNFMQLIHDDSLTFKEDIQKAQVSGQGDSLHEHIANLAGSPAIKKGI |
| | | LQTVKWDELVKVMGRHKPENIVIEMARENQTTQKGQKNSRERMK |
| | | RIEEGIKELGSQILKEHPVENTQLQNEKLYLYYLQNGRDMYVDQEL |
| | | DINRLSDYDVDHIVPQSFLKDDSIDNKVLTRSDKNRGKSDNVPSEE |
| | | VVKKMKNYWRQLLNAKLITQRKFDNLTKAERGGLSELDKAGFIKRQ |
| | | LVETRQITKHVAQILDSRMNTKYDENDKLIREVKVITLKSKLVSDFRK |
| | | DFQFYKVREINNYHHAHDAYLNAVVGTALIKKYPKLESEFVYGDYK |
| | | VYDVRKMIAKSEQEIGKATAKYFFYSNIMNFFKTEITLANGEIRKRPLI |
| | | ETNGETGEIVWDKGRDFATVRKVLSMPQVNIVKKTEVQTGGFSKE |
| | | SILPKRNSDKLIARKKDWDPKKYGGFVSPTVAYSVLVVAKVEKGKS |
| | | KKLKSVKELLGITIMERSSFEKNPIDFLEAKGYKEVKKDLIIKLPKYSL |
| | | FELENGRKRMLASARELQKGNELALPSKYVNFLYLASHYEKLKGSP |
| | | EDNEQKQLFVEQHKHYLDEIIEQISEFSKRVILADANLDKVLSAYNKH |
| | | RDKPIREQAENIIHLFTLTNLGAPAAFKYFDTTIDRKQYRSTKEVLDA |
| | | TLIHQSITGLYETRIDLSQLGGDEGADKRTADGSEFESPKKKRKV |
| 14. | 1449 | MSEVEFSHEYWMRHALTLAKRARDEREVPVGAVLVLNNRVIGEGW |
| monoABE8.1_bpNLS | | NRAIGLHDPTAHAEIMALRQGGLVMQNYRLIDATLYSTFEPCVMCA |
| + V82S + | | GAMIHSRIGRWFGVRNAKTGAAGSLMDVLHYPGMNHRVEITEGIL |
| Q154R polypeptide | | ADECAALLCYFFRMPRRVFNAQKKAQSSTDSGGSSGGSSGSETP |
| sequence | | GTSESATPESSGGSSGGSDKKYSIGLAIGTNSVGWAVITDEYKVPS |
| | | KKFKVLGNTDRHSIKKNLIGALLFDSGETAEATRLKRTARRRYTRRK |
| | | NRICYLQEIFSNEMAKVDDSFFHRLEESFLVEEDKKHERHPIFGNIV |
| | | DEVAYHEKYPTIYHLRKKLVDSTDKADLRLIYLALAHMIKFRGHFLIE |
| | | GDLNPDNSDVDKLFIQLVQTYNQLFEENPINASGVDAKAILSARLSK |
| | | SRRLENLIAQLPGEKKNGLFGNLIALSLGLTPNFKSNFDLAEDAKLQ |
| | | LSKDTYDDDLDNLLAQIGDQYADLFLAAKNLSDAILLSDILRVNTEITK |
| | | APLSASMIKRYDEHHQDLTLLKALVRQQLPEKYKEIFFDQSKNGYA |
| | | GYIDGGASQEEFYKFIKPILEKMDGTEELLVKLNREDLLRKQRTFDN |
| | | GSIPHQIHLGELHAILRRQEDFYPFLKDNREKIEKILTFRIPYYVGPLA |
| | | RGNSRFAWMTRKSEETITPWNFEEVVDKGASAQSFIERMTNFDKN |
| | | LPNEKVLPKHSLLYEYFTVYNELTKVKYVTEGMRKPAFLSGEQKKAI |
| | | VDLLFKTNRKVTVKQLKEDYFKKIECFDSVEISGVEDRFNASLGTYH |
| | | DLLKIIKDKDFLDNEENEDILEDIVLTLTLFEDREMIEERLKTYAHLFD |
| | | DKVMKQLKRRRYTGWGRLSRKLINGIRDKQSGKTILDFLKSDGFAN |
| | | RNFMQLIHDDSLTFKEDIQKAQVSGQGDSLHEHIANLAGSPAIKKGI |
| | | LQTVKWDELVKVMGRHKPENIVIEMARENQTTQKGQKNSRERMK |
| | | RIEEGIKELGSQILKEHPVENTQLQNEKLYLYYLQNGRDMYVDQEL |
| | | DINRLSDYDVDHIVPQSFLKDDSIDNKVLTRSDKNRGKSDNVPSEE |
| | | WKKMKNYWRQLLNAKLITQRKFDNLTKAERGGLSELDKAGFIKRQ |
| | | LVETRQITKHVAQILDSRMNTKYDENDKLIREVKVITLKSKLVSDFRK |
| | | DFQFYKVREINNYHHAHDAYLNAVVGTALIKKYPKLESEFVYGDYK |
| | | VYDVRKMIAKSEQEIGKATAKYFFYSNIMNFFKTEITLANGEIRKRPLI |
| | | ETNGETGEIVWDKGRDFATVRKVLSMPQVNIVKKTEVQTGGFSKE |
| | | SILPKRNSDKLIARKKDWDPKKYGGFVSPTVAYSVLVVAKVEKGKS |
| | | KKLKSVKELLGITIMERSSFEKNPIDFLEAKGYKEVKKDLIIKLPKYSL |
| | | FELENGRKRMLASARELQKGNELALPSKYVNFLYLASHYEKLKGSP |
| | | EDNEQKQLFVEQHKHYLDEIIEQISEFSKRVILADANLDKVLSAYNKH |
| | | RDKPIREQAENIIHLFTLTNLGAPAAFKYFDTTIDRKQYRSTKEVLDA |
| | | TLIHQSITGLYETRIDLSQLGGDEGADKRTADGSEFESPKKKRKV |
| Linker | 65 | PAPAP |
| Linker | 66 | PAPAPA |
| Linker | 67 | PAPAPAP |
| Linker | 68 | PAPAPAPA |
| Linker | 69 | P(AP)4 |
| Linker | 70 | P(AP)7 |
| Linker | 71 | P(AP)10 |
| N gene (nucleic | 4001 | atggatgccgacaagattgtattcaaagtcaataatcaggtggtctctttgaagcctgagattatc |
| acid) | | gtggatcaatatgagtacaagtaccctgccatcaaagatttgaaaaagccctgtataaccctag |
| | | gaaaggctcccgatttaaataaagcatacaagtcagttttgtcaggcatgagcgccgccaaac |
| | | ttaatcctgacgatgtatgttcctatttggcagcggcaatgcagttttttgaggggacatgtccgg |
| | | aagactggaccagctatggaattgtgattgcacgaaaaggagataagatcaccccaggttctct |
| | | ggtggagataaaacgtactgatgtagaagggaattgggctctgacaggaggcatggaactga |
| | | caagagaccccactgtccctgagcatgcgtccttagtcggtcttctcttgagtctgtataggttga |
| | | gcaaaatatccgggcaaaacactggtaactataagacaaacattgcagacaggatagagcag |
| | | atttttgagacagccccttttgttaaaatcgtggaacaccatactctaatgacaactcacaaaatg |
| | | tgtgctaattggagtactataccaaacttcagatttttggccggaacctatgacatgtttttctcc |
| | | cggattgagcatctatattcagcaatcagagtgggcacagttgtcactgcttatgaagactgttca |
| | | ggactggtatcatttactgggttcataaaacaaatcaatctcaccgctagagaggcaatactatat |
| | | ttcttccacaagaactttgaggaagagataagaagaatgtttgagccagggcaggagacagct |
| | | gttcctcactcttatttcatccacttccgttcactaggcttgagtgggaaatctccttattcatca |
| | | aatgctgttggtcacgtgttcaatctcattcactttgtaggatgctatatgggtcaagtcagatcc |
| | | ctaaatgcaacggttattgctgcatgtgctcctcatgaaatgtctgttctagggggctatctggga |
| | | gaggaattcttcgggaaagggacatttgaaagaagattcttcagagatgagaaagaacttcaagaa |
| | | tacgaggcggctgaactgacaaagactgacgtagcactggcagatgatggaactgtcaactctga |
| | | cgacgaggactacttttcaggtgaaaccagaagtccggaggctgtttatactcgaatcatgatg |
| | | aatggaggtcgactaaagagatctcacatacggagatatgtctcagtcagttccaatcatcaag |
| | | cccgtccaaactcattcgccgagtttctaaacaagacatattcgagtgactca |
| N gene (amino | 4002 | MDADKIVFKVNNQWSLKPEIIVDQYEYKYPAIKDLKKPCITLGKAPD |
| acid) | | LNKAYKSVLSGMSAAKLNPDDVCSYLAAAMQFFEGTCPEDWTSYG |
| | | IVIARKGDKITPGSLVEIKRTDVEGNWALTGGMELTRDPTVPEHASL |
| | | VGLLLSLYRLSKISGQNTGNYKTNIADRIEQIFETAPFVKIVEHHTLMT |
| | | THKMCANWSTIPNFRFLAGTYDMFFSRIEHLYSAIRVGTVVTAYED |
| | | CSGLVSFTGFIKQINLTAREAILYFFHKNFEEEIRRMFEPGQETAVPH |
| | | SYFIHFRSLGLSGKSPYSSNAVGHVFNLIHFVGCYMGQVRSLNATVI |
| | | AACAPHEMSVLGGYLGEEFFGKGTFERRFFRDEKELQEYEAAELT |
| | | KTDVALADDGTVNSDDEDYFSGETRSPEAVYTRIMMNGGRLKRSH |
| | | IRRYVSVSSNHQARPNSFAEFLNKTYSSDS |
| L gene (nucleic | 4003 | ctcgatcctggagaggtctatgatgaccctattgacccaatcgagttagaggctgaacccagag |
| acid) | | gaacccccattgtccccaacatcttgaggaactctgactacaatctcaactctcctttgatagaag |
| | | atcctgctagactaatgttagaatggttaaaaacagggaatagaccttatcggatgactctaaca |
| | | gacaattgctccaggtctttcagagttttgaaagattatttcaagaaggtagatttgggttctctcaa |
| | | ggtgggcggaatggctgcacagtcaatgatttctctctggttatatggtgcccactctgaatccaa |
| | | caggagccggagatgtataacagacttggcccatttctattccaagtcgtcccccatagagaag |
| | | ctgttgaatctcacgctaggaaatagagggctgagaatccccccagagggagtgttaagttgc |
| | | cttgagagggttgattatgataatgcatttggaaggtatcttgccaacacgtattcctcttacttgttc |
| | | ttccatgtaatcaccttatacatgaacgccctagactgggatgaagaaaagaccatcctagcatt |
| | | atggaaagatttaacctcagtggacatcgggaaggacttggtaaagttcaaagaccaaatatg |
| | | gggactgctgatcgtgacaaaggactttgtttactcccaaagttccaattgtctttttgacagaaac |
| | | tacacacttatgctaaaagatcttttcttgtctcgcttcaactccttaatggtcttgctctctccccca |
| | | gagccccgatactcagatgacttgatatctcaactatgccagctgtacattgctggggatcaagtct |
| | | tgtctatgtgtggaaactccggctatgaagtcatcaaaatattggagccatatgtcgtgaatagttt |
| | | agtccagagagcagaaaagtttaggcctctcattcattccttgggagactttcctgtatttataaaa |
| | | gacaaggtaagtcaacttgaagagacgttcggtccctgtgcaagaaggttctttagggctctgg |
| | | atcaattcgacaacatacatgacttggtttttgtgtttggctgttacaggcattgggggcacccatat |
| | | atagattatcgaaagggtctgtcaaaactatatgatcaggttcaccttaaaaaaatgatagataa |
| | | gtcctaccaggagtgcttagcaagcgacctagccaggaggatccttagatggggttttgataag |
| | | tactccaagtggtatctggattcaagattcctagcccgagaccaccccttgactccttatatcaaa |
| | | acccaaacatggccacccaaacatattgtagacttggtgggggatacatggcacaagctccc |
| | | gatcacgcagatctttgagattcctgaatcaatggatccgtcagaaatattggatgacaaatcac |
| | | attctttcaccagaacgagactagcttcttggctgtcagaaaaccgaggggggcctgttcctagc |
| | | gaaaaagttattatcacggccctgtctaagccgcctgtcaatccccgagagtttctgaggtctata |
| | | gacctcggaggattgccagatgaagacttgataattggcctcaagccaaaggaacgggaatt |
| | | gaagattgaaggtcgattctttgctctaatgtcatggaatctaagattgtattttgtcatcactgaaa |
| | | aactcttggccaactacatcttgccactttttgacgcgctgactatgacagacaacctgaacaag |
| | | gtgtttaaaaagctgatcgacagggtcaccgggcaagggcttttggactattcaagggtcacat |
| | | atgcatttcacctggactatgaaaagtggaacaaccatcaaagattagagtcaacagaggatg |
| | | tattttctgtcctagatcaagtgtttggattgaagagagtgttttctagaacacacgagttttttcaaa |
| | | aggcctggatctattattcagacagatcagacctcatcgggttacgggaggatcaaatatactg |
| | | cttagatgcgtccaacggcccaacctgttggaatggccaggatggcgggctagaaggcttacg |
| | | gcagaagggctggagtctagtcagcttattgatgatagatagagaatctcaaatcaggaacac |
| | | aagaaccaaaatactagctcaaggagacaaccaggttttatgtccgacatacatgttgtcgcc |
| | | agggctatctcaagaggggctcctctatgaattggagagaatatcaaggaatgcactttcgatat |
| | | acagagccgtcgaggaaggggcatctaagctagggctgatcatcaagaaagaagagacca |
| | | tgtgtagttatgacttcctcatctatggaaaaacccctttgtttagaggtaacatattggtgcctgagt |
| | | ccaaaagatgggccagagtctcttgcgtctctaatgaccaaatagtcaacctcgccaatataat |
| | | gtcgacagtgtccaccaatgcgctaacagtggcacaacactctcaatctttgatcaaaccgatg |
| | | agggattttctgctcatgtcagtacaggcagtctttcactacctgctatttagcccaatcttaaaggg |
| | | aagagtttacaagattctgagcgctgaaggggagagctttctcctagccatgtcaaggataatct |
| | | atctagatccttctttgggagggatatctggaatgtccctcggaagattccatatacgacagttctc |
| | | agaccctgtctctgaagggttatccttctggagagagatctggttaagctcccaagagtcctgga |
| | | ttcacgcgttgtgtcaagaggctggaaacccagatcttggagagagaacactcgagagcttca |
| | | ctcgccttctagaagatccgaccaccttaaatatcagaggaggggccagtcctaccattctactc |
| | | aaggatgcaatcagaaaggctttatatgacgaggtggacaaggtggaaaattcagagtttcga |
| | | gaggcaatcctgttgtccaagacccatagagataattttatactcttcttaatatctgttgagcctct |
| | | gtttcctcgatttctcagtgagctattcagttcgtcttttttgggaatccccgagtcaatcattggatt |
| | | gatacaaaactcccgaacgataagaaggcagtttagaaagagtctctcaaaaactttagaaga |
| | | atccttctacaactcagagatccacgggattagtcggatgacccagacacctcagagggttgg |
| | | gggggtgtggccttgctcttcagagagggcagatctacttagggagatctcttggggaagaaa |
| | | agtggtaggcacgacagttcctcacccttctgagatgttgggattacttcccaagtcctctatttctt |
| | | gcacttgtggagcaacaggaggaggcaatcctagagtttctgtatcagtactcccgtcctttgatc |
| | | agtcatttttttcacgaggccccctaaagggatacttgggctcgtccacctctatgtcgacccagct |
| | | attccatgcatgggaaaaagtcactaatgttcatgtggtgaagagagctctatcgttaaaagaat |
| | | ctataaactggttcattactagagattccaacttggctcaagctctaattaggaacattatgtctctg |
| | | acaggccctgatttccctctagaggaggcccctgtcttcaaaaggacggggtcagccttgcata |
| | | ggttcaagtctgccagatacagcgaaggagggtattcttctgtctgcccgaacctcctctctcata |
| | | tttctgttagtacagacaccatgtctgatttgacccaagacgggaagaactacgatttcatgttcc |
| | | agccattgatgctttatgcacagacatggacatcagagctggtacagagagacacaaggcta |
| | | agagactctacgtttcattggcacctccgatgcaacaggtgtgtgagacccattgacgacgtga |
| | | ccctggagacctctcagatcttcgagtttccggatgtgtcgaaaagaatatccagaatggtttctg |
| | | gggctgtgcctcacttccagaggcttcccgatatccgtctgagaccaggagattttgaatctctaa |
| | | gcggtagagaaaagtctcaccatatcggatcagctcaggggctcttatactcaatcttagtggc |
| | | aattcacgactcaggatacaatgatggaaccatcttccctgtcaacatatacggcaaggtttccc |
| | | ctagagactatttgagagggctcgcaaggggagtattgataggatcctcgatttgcttcttgacaa |
| | | gaatgacaaatatcaatattaatagacctcttgaattggtctcaggggtaatctcatatattctcctg |
| | | aggctagataaccatccctccttgtacataatgctcagagaaccgtctcttagaggagagatatt |
| | | ttctatccctcagaaaatccccgccgcttatccaaccactatgaaagaaggcaacagatcaatc |
| | | ttgtgttatctccaacatgtgctacgctatgagcgagagataatcacggcgtctccagagaatga |
| | | ctggctatggatcttttcagactttagaagtgccaaaatgacgtacctatccctcattacttaccagt |
| | | ctcatcttctactccagagggttgagagaaacctatctaagagtatgagagataacctgcgaca |
| | | attgagttctttgatgaggcaggtgctgggcgggcacggagaagataccttagagtcagacga |
| | | caacattcaacgactgctaaaagactctttacgaaggacaagatgggtggatcaagaggtgc |
| | | gccatgcagctagaaccatgactggagattacagccccaacaagaaggtgtcccgtaaggta |
| | | ggatgttcagaatgggtctgctctgctcaacaggttgcagtctctacctcagcaaacccggcccc |
| | | tgtctcggagcttgacataagggccctctctaagaggttccagaaccctttgatctcgggcttgag |
| | | agtggttcagtgggcaaccggtgctcattataagcttaagcctattctagatgatctcaatgttttcc |
| | | catctctctgccttgtagttggggacgggtcaggggggatatcaagggcagtcctcaacatgttt |
| | | ccagatgccaagcttgtgttcaacagtcttttagaggtgaatgacctgatggcttccggaacaca |
| | | tccactgcctccttcagcaatcatgaggggaggaaatgatatcgtctccagagtgatagatcttg |
| | | actcaatctgggaaaaaccgtccgacttgagaaacttggcaacctggaaatacttccagtcagt |
| | | ccaaaagcaggtcaacatgtcctatgacctcattatttgcgatgcagaagttactgacattgcatc |
| | | tatcaaccggatcaccctgttaatgtccgattttgcattgtctatagatggaccactctatttggtctt |
| | | caaaacttatgggactatgctagtaaatccaaactacaaggctattcaacacctgtcaagagcgt |
| | | tcccctcggtcacagggtttatcacccaagtaacttcgtctttttcatctgagctctacctccgattct |
| | | ccaaacgagggaagtttttcagagatgctgagtacttgacctcttccacccttcgagaaatgagc |
| | | cttgtgttattcaattgtagcagccccaagagtgagatgcagagagctcgttccttgaactatcag |
| | | gatcttgtgagaggatttcctgaagaaatcatatcaaatccttacaatgagatgatcataactctg |
| | | attgacagtgatgtagaatcttttctagtccacaagatggttgatgatcttgagttacagagggga |
| | | actctgtctaaagtggctatcattatagccatcatgatagttttctccaacagagtcttcaacgtttcc |
| | | aaacccctaactgacccctcgttctatccaccgtctgatcccaaaatcctgaggcacttcaacat |
| | | atgttgcagtactatgatgtatctatctactgctttaggtgacgtccctagcttcgcaagacttcacg |
| | | acctgtataacagacctataacttattacttcagaaagcaagtcattcgagggaacgtttatctat |
| | | cttggagttggtccaacgacacctcagtgttcaaaagggtagcctgtaattctagcctgagtctgt |
| | | catctcactggatcaggttgatttacaagatagtgaagactaccagactcgttggcagcatcaa |
| | | ggatctatccagagaagtggaaagacaccttcataggtacaacaggtggatcaccctagagg |
| | | atatcagatctagatcatccetactagactacagttgcctg |
| L gene (amino | 4004 | LDPGEVYDDPIDPIELEAEPRGTPIVPNILRNSDYNLNSPLIEDPARL |
| acid) | | MLEWLKTGNRPYRMTLTDNCSRSFRVLKDYFKKVDLGSLKVGGMA |
| | | AQSMISLWLYGAHSESNRSRRCITDLAHFYSKSSPIEKLLNLTLGNR |
| | | GLRIPPEGVLSCLERVDYDNAFGRYLANTYSSYLFFHVITLYMNALD |
| | | WDEEKTILALWKDLTSVDIGKDLVKFKDQIWGLLIVTKDFVYSQSSN |
| | | CLFDRNYTLMLKDLFLSRFNSLMVLLSPPEPRYSDDLISQLCQLYIA |
| | | GDQVLSMCGNSGYEVIKILEPYWNSLVQRAEKFRPLIHSLGDFPVF |
| | | IKDKVSQLEETFGPCARRFFRALDQFDNIHDLVFVFGCYRHWGHPY |
| | | IDYRKGLSKLYDQVHLKKMIDKSYQECLASDLARRILRWGFDKYSK |
| | | WYLDSRFLARDHPLTPYIKTQTWPPKHIVDLVGDTWHKLPITQIFEIP |
| | | ESMDPSEILDDKSHSFTRTRLASWLSENRGGPVPSEKVIITALSKPP |
| | | VNPREFLRSIDLGGLPDEDLIIGLKPKERELKIEGRFFALMSWNLRLY |
| | | FVITEKLLANYILPLFDALTMTDNLNKVFKKLIDRVTGQGLLDYSRVT |
| | | YAFHLDYEKWNNHQRLESTEDVFSVLDQVFGLKRVFSRTHEFFQK |
| | | AWIYYSDRSDLIGLREDQIYCLDASNGPTCWNGQDGGLEGLRQKG |
| | | WSLVSLLMIDRESQIRNTRTKILAQGDNQVLCPTYMLSPGLSQEGLL |
| | | YELERISRNALSIYRAVEEGASKLGLIIKKEETMCSYDFLIYGKTPLFR |
| | | GNILVPESKRWARVSCVSNDQIVNLANIMSTVSTNALTVAQHSQSLI |
| | | KPMRDFLLMSVQAVFHYLLFSPILKGRVYKILSAEGESFLLAMSRIIY |
| | | LDPSLGGISGMSLGRFHIRQFSDPVSEGLSFWREIWLSSQESWIHA |
| | | LCQEAGNPDLGERTLESFTRLLEDPTTLNIRGGASPTILLKDAIRKAL |
| | | YDEVDKVENSEFREAILLSKTHRDNFILFLISVEPLFPRFLSELFSSSF |
| | | LGIPESIIGLIQNSRTIRRQFRKSLSKTLEESFYNSEIHGISRMTQTPQ |
| | | RVGGVWPCSSERADLLREISWGRKVVGTTVPHPSEMLGLLPKSSI |
| | | SCTCGATGGGNPRVSVSVLPSFDQSFFSRGPLKGYLGSSTSMSTQ |
| | | LFHAWEKVTNVHVVKRALSLKESINWFITRDSNLAQALIRNIMSLTG |
| | | PDFPLEEAPVFKRTGSALHRFKSARYSEGGYSSVCPNLLSHISVST |
| | | DTMSDLTQDGKNYDFMFQPLMLYAQTWTSELVQRDTRLRDSTFH |
| | | WHLRCNRCVRPIDDVTLETSQIFEFPDVSKRISRMVSGAVPHFQRL |
| | | PDIRLRPGDFESLSGREKSHHIGSAQGLLYSILVAIHDSGYNDGTIFP |
| | | VNIYGKVSPRDYLRGLARGVLIGSSICFLTRMTNININRPLELVSGVIS |
| | | YILLRLDNHPSLYIMLREPSLRGEIFSIPQKIPAAYPTTMKEGNRSILC |
| | | YLQHVLRYEREIITASPENDWLWIFSDFRSAKMTYLSLITYQSHLLLQ |
| | | RVERNLSKSMRDNLRQLSSLMRQVLGGHGEDTLESDDNIQRLLKD |
| | | SLRRTRWVDQEVRHAARTMTGDYSPNKKVSRKVGCSEWVCSAQ |
| | | QVAVSTSANPAPVSELDIRALSKRFQNPLISGLRVVQWATGAHYKL |
| | | KPILDDLNVFPSLCLVVGDGSGGISRAVLNMFPDAKLVFNSLLEVND |
| | | LMASGTHPLPPSAIMRGGNDIVSRVIDLDSIWEKPSDLRNLATWKYF |
| | | QSVQKQVNMSYDLIICDAEVTDIASINRITLLMSDFALSIDGPLYLVFK |
| | | TYGTMLVNPNYKAIQHLSRAFPSVTGFITQVTSSFSSELYLRFSKRG |
| | | KFFRDAEYLTSSTLREMSLVLFNCSSPKSEMQRARSLNYQDLVRG |
| | | FPEEIISNPYNEMIITLIDSDVESFLVHKMVDDLELQRGTLSKVAIIIAI |
| | | MIVFSNRVFNVSKPLTDPSFYPPSDPKILRHFNICCSTMMYLSTALG |
| | | DVPSFARLHDLYNRPITYYFRKQVIRGNVYLSWSWSNDTSVFKRVA |
| | | CNSSLSLSSHWIRLIYKIVKTTRLVGSIKDLSREVERHLHRYNRWITL |
| | | EDIRSRSSLLDYSCL |
| M gene (nucleic | 4005 | ttctagaagcagagaggaatctttgtcctcttcggacctttgtgtctgaagagacatgtcagacca |
| acid) | | tagttgacatgctctcgggttcatgttgatacaccagactctgccctggatatgacactgttttgcaa |
| | | tcactcttatttgcaatccgacgaactcagtatcatcatcccaagtgatctcctgagagtattccaa |
| | | ctcctccccttcaagagggcccctggaatcagcccactggaagataaaggttctcctcaatttgt |
| | | atacccagttcaggccctcagggactggagatcctgacaaagccagtccaataaccactttga |
| | | ctaacccgatcatcctatgattcccagaatatatctcgtcgaatgatttcagaatgtgccgcagga |
| | | tcctgaacgagtaaccattcgggctacacactttaacccttccgttgatacaaaagttcctcatgtt |
| | | cttcttgcctgtaagttctttcagcgggacgtattcagggggtggaagccacaagtcatcgtcatc |
| | | cagaggggctgacgcgggagaggatttttgagtgtcctcgtccctgcggtttttcactatcttacgt |
| | | aggaggtt |
| M gene (amino | 4006 | NLLRKIVKNRRDEDTQKSSPASAPLDDDDLWLPPPEYVPLKELTGK |
| acid) | | KNMRNFCINGRVKVCSPNGYSFRILRHILKSFDEIYSGNHRMIGLVK |
| | | VVIGLALSGSPVPEGLNWVYKLRRTFIFQWADSRGPLEGEELEYSQ |
| | | EITWDDDTEFVGLQIRVIAKQCHIQGRVWCINMNPRACQLWSDMSL |
| | | QTQRSEEDKDSSLLLE |
| P gene (nucleic | 4007 | agcaagatctttgtcaatcctagtgctattagagccggtctggccgatcttgagatggctgaaga |
| acid) | | aactgttgatctgatcaatagaaatatcgaagacaatcaggctcatctccaaggggaacccat |
| | | agaggtggacaatctccctgaggatatggggcgacttcacctggatgatggaaaatcgccca |
| | | accatggtgagatagccaaggtgggagaaggcaagtatcgagaggactttcagatggatga |
| | | aggagaggatcctagcttcctgttccagtcatacctggaaaatgttggagtccaaatagtcaga |
| | | caaatgaggtcaggagagagatttctcaagatatggtcacagaccgtagaagagattatatcc |
| | | tatgtcgcggtcaactttcccaaccctccaggaaagtcttcagaggataaatcaacccagacta |
| | | ctggccgagagctcaagaaggagacaacacccactccttctcagagagaaagccaatcatc |
| | | gaaagccaggatggcggctcaaattgcttctggccctccagcccttgaatggtcggctaccaat |
| | | gaagaggatgatctatcagtggaggctgagatcgctcaccagattgcagaaagtttctccaaa |
| | | aaatataagtttccctctcgatcctcagggatactcttgtataattttgagcaattgaaaatgaacct |
| | | tgatgatatagttaaagaggcaaaaaatgtaccaggtgtgacccgtttagcccatgacgggtcc |
| | | aaactccccctaagatgtgtactgggatgggtcgctttggccaactctaagaaattccagttgtta |
| | | gtcgaatccgacaagctgagtaaaatcatgcaagatgacttgaatcgdatacatcttgc |
| P gene (amino | 4008 | SKIFVNPSAIRAGLADLEMAEETVDLINRNIEDNQAHLQGEPIEVDNL |
| acid) | | PEDMGRLHLDDGKSPNHGEIAKVGEGKYREDFQMDEGEDPSFLF |
| | | QSYLENVGVQIVRQMRSGERFLKIWSQTVEEIISYVAVNFPNPPGK |
| | | SSEDKSTQTTGRELKKETTPTPSQRESQSSKARMAAQIASGPPALE |
| | | WSATNEEDDLSVEAEIAHQIAESFSKKYKFPSRSSGILLYNFEQLKM |
| | | NLDDIVKEAKNVPGVTRLAHDGSKLPLRCVLGWVALANSKKFQLLV |
| | | ESDKLSKIMQDDLNRYTSC |
| G gene (nucleic | 4009 | atggttcctcaggctctcctgtttgtaccccttctggtttttccattgtgttttgggaaattcccta |
| acid) | | tttacacgataccagacaagcttggtccctggagtccgattgacatacatcacctcagctgcccaaaca |
| | | atttggtagtggaggacgaaggatgcaccaacctgtcagggttctcctacatggaacttaaagtt |
| | | ggatacatcttagccataaaagtgaacgggttcacttgcacaggcgttgtgacggaggctgaa |
| | | acctacactaacttcgttggttatgtcacaaccacgttcaaaagaaagcatttccgcccaacacc |
| | | agatgcatgtagagccgcgtacaactggaagatggccggtgaccccagatatgaagagtctc |
| | | tacacaatccgtaccctgactaccgctggcttcgaactgtaaaaaccaccaaggagtctctcgtt |
| | | atcatatctccaagtgtggcagatttggacccatatgacagatcccttcactcgagggtcttccct |
| | | agcgggaagtgctcaggagtagcggtgtcttctacctactgctccactaaccacgattacacca |
| | | tttggatgcccgagaatccgagactagggatgtcttgtgacatttttaccaatagtagagggaag |
| | | agagcatccaaagggagtgagacttgcggctttgtagatgaaagaggcctatataagtctttaa |
| | | aaggagcatgcaaactcaagttatgtggagttctaggacttagacttatggatggaacatgggt |
| | | ctcgatgcaaacatcaaatgaaaccaaatggtgccctcccgataagttggtgaacctgcacga |
| | | ctttcgctcagacgaaattgagcaccttgttgtagaggagttggtcaggaagagagaggagtgt |
| | | ctggatgcactagagtccatcatgacaaccaagtcagtgagtttcagacgtctcagtcatttaag |
| | | aaaacttgtccctgggtttggaaaagcatataccatattcaacaagaccttgatggaagccgat |
| | | gctcactacaagtcagtcagaacttggaatgagatcctcccttcaaaagggtgtttaagagttgg |
| | | ggggaggtgtcatcctcatgtgaacggggtgtttttcaatggtataatattaggacctgacggca |
| | | atgtcttaatcccagagatgcaatcatccctcctccagcaacatatggagttgttggaatcctcgg |
| | | ttatcccccttgtgcaccccctggcagacccgtctaccgttttcaaggacggtgacgaggctgag |
| | | gattttgttgaagttcaccttcccgatgtgcacaatcaggtctcaggagttgacttgggtctcccga |
| | | actgggggaagtatgtattactgagtgcaggggccctgactgccttgatgttgataattttcctgat |
| | | gacatgttgtagaagagtcaatcgatcagaacctacgcaacacaatctcagagggacaggg |
| | | agggaggtgtcagtcactccccaaagcgggaagatcatatcttcatgggaatcacacaagag |
| | | tgggggtgagaccagactg |
| G gene (amino | 4010 | MVPQALLFVPLLVFPLCFGKFPIYTIPDKLGPWSPIDIHHLSCPNNLV |
| acid) | | VEDEGCTNLSGFSYMELKVGYILAIKVNGFTCTGWTEAETYTNFV |
| | | GYVTTTFKRKHFRPTPDACRAAYNWKMAGDPRYEESLHNPYPDY |
| | | RWLRTVKTTKESLVIISPSVADLDPYDRSLHSRVFPSGKCSGVAVS |
| | | STYCSTNHDYTIWMPENPRLGMSCDIFTNSRGKRASKGSETCGFV |
| | | DERGLYKSLKGACKLKLCGVLGLRLMDGTWVSMQTSNETKWCPP |
| | | DKLVNLHDFRSDEIEHLWEELVRKREECLDALESIMTTKSVSFRRL |
| | | SHLRKLVPGFGKAYTIFNKTLMEADAHYKSVRTWNEILPSKGCLRV |
| | | GGRCHPHVNGVFFNGIILGPDGNVLIPEMQSSLLQQHMELLESSVIP |
| | | LVHPLADPSTVFKDGDEAEDFVEVHLPDVHNQVSGVDLGLPNWGK |
| | | YVLLSAGALTALMLIIFLMTCCRRVNRSEPTQHNLRGTGREVSVTP |
| | | QSGKIISSWESHKSGGETRL |
| HEK2-2 target | 4011 | gaacacaaagcatagactgc |

The application's sequence listing, which the Patent Office published only in electronic form, follows.

SEQUENCE LISTING (4013 sequences)

SEQ ID NO: 1-7 - skipped (7 entries)

SEQ ID NO: 8 - protein, 167 aa, synthetic construct
MSEVEFSHEYWMRHALTLAKRARDEREVPVGAVLVLNNRVIGEGWNRAIGLHDPTAHAEIMALRQGGLVMQNYRLIDATLYVTFEPCVMCAGAMIHSRIGRVVFGVRNAKTGAAGSLMDVLHYPGMNHRVEITEGILADECAALLCYFFRMPRQVFNAQKKAQSSTD

SEQ ID NO: 9-11 - skipped (3 entries)

SEQ ID NO: 12 - protein, 167 aa, synthetic construct
MSEVEFSHEYWMRHALTLAKRARDEREVPVGAVLVLNNRVIGEGWNRAIGLHDPTAHAEIMALRQGGLVMQNYRLIDATLYVTFEPCVMCAGAMIHSRIGRVVFGVRNAKTGAAGSLMDVLHYPGMNHRVEITEGILADECAALLCTFFRMPRQVFNAQKKAQSSTD

SEQ ID NO: 13-40 - skipped (28 entries)

SEQ ID NO: 41 - protein, 208 aa, Petromyzon marinus
MTDAEYVRIHEKLDIYTFKKQFFNNKKSVSHRCYVLFELKRRGERRACFWGYAVNKPQSGTERGIHAEIFSIRKVEEYLRDNPGQFTINWYSSWSPCADCAEKILEWYNQELRGNGHTLKIWACKLYYEKNARNQIGLWNLRDNGVGLNVMVSEHYQCCRKIFIQSSHNQLNENRWLEKTLKRAEKRRSELSIMIQVKILHTTKSPAV

SEQ ID NO: 42 - DNA, 766 bp, Petromyzon marinus
  source 1..766: mol_type = genomic DNA
tgacacgacacagccgtgtatatgaggaagggtagctggatggggggggggggaatacgttcagagaggacattagcgagcgtcttgttggtggccttgagtctagacacctgcagacatgaccgacgctgagtacgtgagaatccatgagaagttggacatctacacgtttaagaaacagtttttcaacaacaaaaaatccgtgtcgcatagatgctacgttctctttgaattaaaacgacggggtgaacgtagagcgtgtttttggggctatgctgtgaataaaccacagagcgggacagaacgtggaattcacgccgaaatctttagcattagaaaagtcgaagaatacctgcgcgacaaccccggacaattcacgataaattggtactcatcctggagtccttgtgcagattgcgctgaaaagatcttagaatggtataaccaggagctgcgggggaacggccacactttgaaaatctgggcttgcaaactctattacgagaaaaatgcgaggaatcaaattgggctgtggaacctcagagataacggggttgggttgaatgtaatggtaagtgaacactaccaatgttgcaggaaaatattcatccaatcgtcgcacaatcaattgaatgagaatagatggcttgagaagactttgaagcgagctgaaaaacgacggagcgagttgtccattatgattcaggtaaaaatactccacaccactaagagtcctgctgtttaagaggctatgcggatggttttc

SEQ ID NO: 43 - protein, 145 aa, Homo sapiens
MDSLLMNRRKFLYQFKNVRWAKGRRETYLCYVVKRRDSATSFSLDFGYLRNKNGCHVELLFLRYISDWDLDPGRCYRVTWFTSWSPCYDCARHVADFLRGNPNLSLRIFTARLYFCEDRKAEPEGLRRLHRAGVQIAIMTFKAPV

SEQ ID NO: 44 - DNA, 10681 bp, Homo sapiens
  source 1..10681: mol_type = genomic DNA
agagaaccatcattaattgaagtgagatttttctggcctgagacttgcagggaggcaagaagacactctggacaccactatggacaggtaaagaggcagtcttctcgtgggtgattgcactggccttcctctcagagcaaatctgagtaatgagactggtagctatccctttctctcatgtaactgtctgactgataagatcagcttgatcaatatgcatatatattttttgatctgtctccttttcttctattcagatcttatacgctgtcagcccaattctttctgtttcagacttctcttgatttccctctttttcatgtggcaaaagaagtagtgcgtacaatgtactgattcgtcctgagatttgtaccatggttgaaactaatttatggtaataatattaacatagcaaatctttagagactcaaatcatgaaaaggtaatagcagtactgtactaaaaacggtagtgctaattttcgtaataattttgtaaatattcaacagtaaaacaacttgaagacacactttcctagggaggcgttactgaaataatttagctatagtaagaaaatttgtaattttagaaatgccaagcattctaaattaattgcttgaaagtcactatgattgtgtccattataaggagacaaattcattcaagcaagttatttaatgttaaaggcccaattgttaggcagttaatggcacttttactattaactaatctttccatttgttcagacgtagcttaacttacctcttaggtgtgaatttggttaaggtcctcataatgtctttatgtgcagtttttgataggttattgtcatagaacttattctattcctacatttatgattactatggatgtatgagaataacacctaatccttatactttacctcaatttaactcctttataaagaacttacattacagaataaagattttttaaaaatatatttttttgtagagacagggtcttagcccagccgaggctggtctctaagtcctggcccaagcgatcctcctgcctgggcctcctaaagtgctggaattatagacatgagccatcacatccaatatacagaataaagatttttaatggaggatttaatgttcttcagaaaattttcttgaggtcagacaatgtcaaatgtctcctcagtttacactgagattttgaaaacaagtctgagctataggtccttgtgaagggtccattggaaatacttgttcaaagtaaaatggaaagcaaaggtaaaatcagcagttgaaattcagagaaagacagaaaaggagaaaagatgaaattcaacaggacagaagggaaatatattatcattaaggaggacagtatctgtagagctcattagtgatggcaaaatgacttggtcaggattatttttaacccgcttgtttctggtttgcacggctggggatgcagctagggttctgcctcagggagcacagctgtccagagcagctgtcagcctgcaagcctgaaacactccctcggtaaagtccttcctactcaggacagaaatgacgagaacagggagctggaaacaggcccctaaccagagaagggaagtaatggatcaacaaagttaactagcaggtcaggatcacgcaattcatttcactctgactggtaacatgtgacagaaacagtgtaggcttattgtattttcatgtagagtaggacccaaaaatccacccaaagtcctttatctatgccacatccttcttatctatacttccaggacactttttcttccttatgataaggctctctctctctccacacacacacacacacacacacacacacacacacacacacacacaaacacacaccccgccaaccaaggtgcatgtaaaaagatgtagattcctctgcctttctcatctacacagcccaggagggtaagttaatataagagggatttattggtaagagatgatgcttaatctgtttaacactgggcctcaaagagagaatttcttttcttctgtacttattaagcacctattatgtgttgagcttatatatacaaagggttattatatgctaatatagtaatagtaatggtggttggtactatggtaattaccataaaaattattatccttttaaaataaagctaattattattggatcttttttagtattcattttatgttttttatgtttttgattttttaaaagacaatctcaccctgttacccaggctggagtgcagtggtgcaatcatagctttctgcagtcttgaactcctgggctcaagcaatcctcctgccttggcctcccaaagtgttgggatacagtcatgagccactgcatctggcctaggatccatttagattaaaatatgcattttaaattttaaaataatatggctaatttttaccttatgtaatgtgtatactggcaataaatctagtttgctgcctaaagtttaaagtgctttccagtaagcttcatgtacgtgaggggagacatttaaagtgaaacagacagccaggtgtggtggctcacgcctgtaatcccagcactctgggaggctgaggtgggtggatcgcttgagccctggagttcaagaccagcctgagcaacatggcaaaacgctgtttctataacaaaaattagccgggcatggtggcatgtgcctgtggtcccagctactagggggctgaggcaggagaatcgttggagcccaggaggtcaaggctgcactgagcagtgcttgcgccactgcactccagcctgggtgacaggaccagaccttgcctcaaaaaaataagaagaaaaattaaaaataaatggaaacaactacaaagagctgttgtcctagatgagctacttagttaggctgatattttggtatttaacttttaaagtcagggtctgtcacctgcactacattattaaaatatcaattctcaatgtatatccacacaaagactggtacgtgaatgttcatagtacctttattcacaaaaccccaaagtagagactatccaaatatccatcaacaagtgaacaaataaacaaaatgtgctatatccatgcaatggaataccaccctgcagtacaaagaagctacttggggatgaatcccaaagtcatgacgctaaatgaaagagtcagacatgaaggaggagataatgtatgccatacgaaattctagaaaatgaaagtaacttatagttacagaaagcaaatcagggcaggcatagaggctcacacctgtaatcccagcactttgagaggccacgtgggaagattgctagaactcaggagttcaagaccagcctgggcaacacagtgaaactccattctccacaaaaatgggaaaaaaagaaagcaaatcagtggttgtcctgtggggaggggaaggactgcaaagagggaagaagctctggtggggtgagggtggtgattcaggttctgtatcctgactgtggtagcagtttggggtgtttacatccaaaaatattcgtagaattatgcatcttaaatgggtggagtttactgtatgtaaattatacctcaatgtaagaaaaaataatgtgtaagaaaactttcaattctcttgccagcaaacgttattcaaattcctgagccctttacttcgcaaattctctgcacttctgccccgtaccattaggtgacagcactagctccacaaattggataaatgcatttctggaaaagactagggacaaaatccaggcatcacttgtgctttcatatcaaccatgctgtacagcttgtgttgctgtctgcagctgcaatggggactcttgatttctttaaggaaacttgggttaccagagtatttccacaaatgctattcaaattagtgcttatgatatgcaagacactgtgctaggagccagaaaacaaagaggaggagaaatcagtcattatgtgggaacaacatagcaagatatttagatcattttgactagttaaaaaagcagcagagtacaaaatcacacatgcaatcagtataatccaaatcatgtaaatatgtgcctgtagaaagactagaggaataaacacaagaatcttaacagtcattgtcattagacactaagtctaattattattattagacactatgatatttgagatttaaaaaatctttaatattttaaaatttagagctcttctatttttccatagtattcaagtttgacaatgatcaagtattactctttctttttttttttttttttttttttttgagatggagttttggtcttgttgcccatgctggagtggaatggcatgaccatagctcactgcaacctccacctcctgggttcaagcaaagctgtcgcctcagcctcccgggtagatgggattacaggcgcccaccaccacactcggctaatgtttgtatttttagtagagatggggtttcaccatgttggccaggctggtctcaaactcctgacctcagaggatccacctgcctcagcctcccaaagtgctgggattacagatgtaggccactgcgcccggccaagtattgctcttatacattaaaaaacaggtgtgagccactgcgcccagccaggtattgctcttatacattaaaaaataggccggtgcagtggctcacgcctgtaatcccagcactttgggaagccaaggcgggcagaacacccgaggtcaggagtccaaggccagcctggccaagatggtgaaaccccgtctctattaaaaatacaaacattacctgggcatgatggtgggcgcctgtaatcccagctactcaggaggctgaggcaggaggatccgcggagcctggcagatctgcctgagcctgggaggttgaggctacagtaagccaagatcatgccagtatacttcagcctgggcgacaaagtgagaccgtaacaaaaaaaaaaaaatttaaaaaaagaaatttagatcaagatccaactgtaaaaagtggcctaaacaccacattaaagagtttggagtttattctgcaggcagaagagaaccatcagggggtcttcagcatgggaatggcatggtgcacctggtttttgtgagatcatggtggtgacagtgtggggaatgttattttggagggactggaggcagacagaccggttaaaaggccagcacaacagataaggaggaagaagatgagggcttggaccgaagcagagaagagcaaacagggaaggtacaaattcaagaaatattggggggtttgaatcaacacatttagatgattaattaaatatgaggactgaggaataagaaatgagtcaaggatggttccaggctgctaggctgcttacctgaggtggcaaagtcgggaggagtggcagtttaggacagggggcagttgaggaatattgttttgatcattttgagtttgaggtacaagttggacacttaggtaaagactggaggggaaatctgaatatacaattatgggactgaggaacaagtttattttattttttgtttcgttttcttgttgaagaacaaatttaattgtaatcccaagtcatcagcatctagaagacagtggcaggaggtgactgtcttgtgggtaagggtttggggtccttgatgagtatctctcaattggccttaaatataagcaggaaaaggagtttatgatggattccaggctcagcagggctcaggagggctcaggcagccagcagaggaagtcagagcatcttctttggtttagcccaagtaatgacttccttaaaaagctgaaggaaaatccagagtgaccagattataaactgtactcttgcattttctctccctcctctcacccacagcctcttgatgaaccggaggaagtttctttaccaattcaaaaatgtccgctgggctaagggtcggcgtgagacctacctgtgctacgtagtgaagaggcgtgacagtgctacatccttttcactggactttggttatcttcgcaataaggtatcaattaaagtcggctttgcaagcagtttaatggtcaactgtgagtgcttttagagccacctgctgatggtattacttccatccttttttggcatttgtgtctctatcacattcctcaaatccttttttttatttctttttccatgtccatgcacccatattagacatggcccaaaatatgtgatttaattcctccccagtaatgctgggcaccctaataccactccttccttcagtgccaagaacaactgctcccaaactgtttaccagctttcctcagcatctgaattgcctttgagattaattaagctaaaagcatttttatatgggagaatattatcagcttgtccaagcaaaaattttaaatgtgaaaaacaaattgtgtcttaagcatttttgaaaattaaggaagaagaatttgggaaaaaattaacggtggctcaattctgtcttccaaatgatttcttttccctcctactcacatgggtcgtaggccagtgaatacattcaacatggtgatccccagaaaactcagagaagcctcggctgatgattaattaaattgatctttcggctacccgagagaattacatttccaagagacttcttcaccaaaatccagatgggtttacataaacttctgcccacgggtatctcctctctcctaacacgctgtgacgtctgggcttggtggaatctcagggaagcatccgtggggtggaaggtcatcgtctggctcgttgtttgatggttatattaccatgcaattttctttgcctacatttgtattgaatacatcccaatctccttcctattcggtgacatgacacattctatttcagaaggctttgattttatcaagcactttcatttacttctcatggcagtgcctattacttctcttacaatacccatctgtctgctttaccaaaatctatttccccttttcagatcctcccaaatggtcctcataaactgtcctgcctccacctagtggtccaggtatatttccacaatgttacatcaacaggcacttctagccattttccttctcaaaaggtgcaaaaagcaacttcataaacacaaattaaatcttcggtgaggtagtgtgatgctgcttcctcccaactcagcgcacttcgtcttcctcattccacaaaaacccatagccttccttcactctgcaggactagtgctgccaagggttcagctctacctactggtgtgctcttttgagcaagttgcttagcctctctgtaacacaaggacaatagctgcaagcatccccaaagatcattgcaggagacaatgactaaggctaccagagccgcaataaaagtcagtgaattttagcgtggtcctctctgtctctccagaacggctgccacgtggaattgctcttcctccgctacatctcggactgggacctagaccctggccgctgctaccgcgtcacctggttcacctcctggagcccctgctacgactgtgcccgacatgtggccgactttctgcgagggaaccccaacctcagtctgaggatcttcaccgcgcgcctctacttctgtgaggaccgcaaggctgagcccgaggggctgcggcggctgcaccgcgccggggtgcaaatagccatcatgaccttcaaaggtgcgaaagggccttccgcgcaggcgcagtgcagcagcccgcattcgggattgcgatgcggaatgaatgagttagtggggaagctcgaggggaagaagtgggcggggattctggttcacctctggagccgaaattaaagattagaagcagagaaaagagtgaatggctcagagacaaggccccgaggaaatgagaaaatggggccagggttgcttctttcccctcgatttggaacctgaactgtcttctacccccatatccccgcctttttttcctttttttttttttgaagattatttttactgctggaatacttttgtagaaaaccacgaaagaactttcaaagcctgggaagggctgcatgaaaattcagttcgtctctccagacagcttcggcgcatccttttggtaaggggcttcctcgctttttaaattttctttctttctctacagtcttttttggagtttcgtatatttcttatattttcttattgttcaatcactctcagttttcatctgatgaaaactttatttctcctccacatcagctttttcttctgctgtttcaccattcagagccctctgctaaggttccttttccctcccttttctttcttttgttgtttcacatctttaaatttctgtctctccccagggttgcgtttccttcctggtcagaattcttttctcctttttttttttttttttttttttttttaaacaaacaaacaaaaaacccaaaaaaactctttcccaatttactttcttccaacatgttacaaagccatccactcagtttagaagactctccggccccaccgacccccaacctcgttttgaagccattcactcaatttgcttctctctttctctacagcccctgtatgaggttgatgacttacgagacgcatttcgtactttgggactttgatagcaacttccaggaatgtcacacacgatgaaatatctctgctgaagacagtggataaaaaacagtccttcaagtcttctctgtttttattcttcaactctcactttcttagagtttacagaaaaaatatttatatacgactctttaaaaagatctatgtcttgaaaatagagaaggaacacaggtctggccagggacgtgctgcaattggtgcagttttgaatgcaacattgtcccctactgggaataacagaactgcaggacctgggagcatcctaaagtgtcaacgtttttctatgacttttaggtaggatgagagcagaaggtagatcctaaaaagcatggtgagaggatcaaatgtttttatatcaacatcctttattatttgattcatttgagttaacagtggtgttagtgatagatttttctattcttttcccttgacgtttactttcaagtaacacaaactcttccatcaggccatgatctataggacctcctaatgagagtatctgggtgattgtgaccccaaaccatctctccaaagcattaatatccaatcatgcgctgtatgttttaatcagcagaagcatgtttttatgtttgtacaaaagaagattgttatgggtggggatggaggtatagaccatgcatggtcaccttcaagctactttaataaaggatcttaaaatgggcaggaggactgtgaacaagacaccctaataatgggttgatgtctgaagtagcaaatcttctggaaacgcaaactcttttaaggaagtccctaatttagaaacacccacaaacttcacatatcataattagcaaacaattggaaggaagttgcttgaatgttggggagaggaaaatctattggctctcgtgggtctcttcatctcagaaatgccaatcaggtcaaggtttgctacattttgtatgtgtgtgatgcttctcccaaaggtatattaactatataagagagttgtgacaaaacagaatgataaagctgcgaaccgtggcacacgctcatagttctagctgcttgggaggttgaggagggaggatggcttgaacacaggtgttcaaggccagcctgggcaacataacaagatcctgtctctcaaaaaaaaaaaaaaaaaaaagaaagagagagggccgggcgtggtggctcacgcctgtaatcccagcactttgggaggccgagccgggcggatcacctgtggtcaggagtttgagaccagcctggccaacatggcaaaaccccgtctgtactcaaaatgcaaaaattagccaggcgtggtagcaggcacctgtaatcccagctacttgggaggctgaggcaggagaatcgcttgaacccaggaggtggaggttgcagtaagctgagatcgtgccgttgcactccagcctgggcgacaagagcaagactctgtctcagaaaaaaaaaaaaaaaagagagagagagagaaagagaacaatatttgggagagaaggatggggaagcattgcaaggaaattgtgctttatccaacaaaatgtaaggagccaataagggatccctatttgtctcttttggtgtctatttgtccctaacaactgtctttgacagtgagaaaaatattcagaataaccatatccctgtgccgttattacctagcaacccttgcaatgaagatgagcagatccacaggaaaacttgaatgcacaactgtcttattttaatcttattgtacataagtttgtaaaagagttaaaaattgttacttcatgtattcatttatattttatattattttgcgtctaatgattttttattaacatgatttccttttctgatatattgaaatggagtctcaaagcttcataaatttataactttagaaatgattctaataacaacgtatgtaattgtaacattgcagtaatggtgctacgaagccatttctcttgatttttagtaaacttttatgacagcaaatttgcttctggctcactttcaatcagttaaataaatgataaataattttggaagctgtgaagataaaataccaaataaaataatataaaagtgatttatatgaagttaaaataaaaaatcagtatgatggaataaacttg

SEQ ID NO: 45-55 - skipped (11 entries)

SEQ ID NO: 56 - protein, 16 aa, synthetic construct
SGSETPGTSESATPES

SEQ ID NO: 57 - protein, 4 aa, synthetic construct
SGGS

SEQ ID NO: 58-64 - skipped (7 entries)

SEQ ID NO: 65 - protein, 5 aa, synthetic construct
PAPAP

SEQ ID NO: 66 - protein, 6 aa, synthetic construct
PAPAPA

SEQ ID NO: 67 - protein, 7 aa, synthetic construct
PAPAPAP

SEQ ID NO: 68 - protein, 8 aa, synthetic construct
PAPAPAPA

SEQ ID NO: 69 - protein, 9 aa, synthetic construct
PAPAPAPAP

SEQ ID NO: 70 - protein, 15 aa, synthetic construct
PAPAPAPAPAPAPAP

SEQ ID NO: 71 - protein, 21 aa, synthetic construct
PAPAPAPAPAPAPAPAPAPAP

SEQ ID NO: 72-82 - skipped (11 entries)

SEQ ID NO: 83 - protein, 29 aa, synthetic construct
PKKKRKVEGADKRTADGSEFESPKKKRKV

SEQ ID NO: 84 - protein, 18 aa, synthetic construct
KRTADGSEFESPKKKRKV

SEQ ID NO: 85 - protein, 16 aa, synthetic construct
KRPAATKKAGQAKKKK

SEQ ID NO: 86 - protein, 17 aa, synthetic construct
KKTELQTTNAENKTKKL

SEQ ID NO: 87 - protein, 19 aa, synthetic construct
KRGINDRNFWRGENGRKTR

SEQ ID NO: 88 - protein, 16 aa, synthetic construct
RKSGKIAAIVVKRPRK

SEQ ID NO: 89 - protein, 7 aa, synthetic construct
PKKKRKV

SEQ ID NO: 90 - protein, 30 aa, synthetic construct
MDSLLMNRRKFLYQFKNVRWAKGRRETYLC

SEQ ID NO: 91-105 - skipped (15 entries)

SEQ ID NO: 106 - protein, 84 aa, unidentified
MTNLSDIIEKETGKQLVIQESILMLPEEVEEVIGNKPESDILVHTAYDESTDENVMLLTSDAPEYKPWALVIQDSNGENKIKML

SEQ ID NO: 107-108 - skipped (2 entries)

SEQ ID NO: 109 - protein, 5 aa, synthetic construct
GGGGS

SEQ ID NO: 110-222 - skipped (113 entries)

SEQ ID NO: 223 - protein, 1368 aa, unidentified [sequence omitted]

SEQ ID NO: 224 - RNA, 80 nt, synthetic construct
  source 1..80: mol_type = other RNA
gttttagagctagaaatagcaagttaaaataaggctagtccgttatcaacttgaaaaagtggcaccgagtcggtgctttt

SEQ ID NO: 225 - RNA, 125 nt, synthetic construct
  source 1..125: mol_type = other RNA
gtttttgtactctcaagatttaagtaactgtacaacgaaacttacacagttacttaaatcttgcagaagctacaaagataaggcttcatgccgaaatcaacaccctgtcattttatggcagggtg

SEQ ID NO: 226 - RNA, 76 nt, synthetic construct
  source 1..76: mol_type = other RNA
gttttagagctagaaatagcaagttaaaataaggctagtccgttatcaacttgaaaaagtggcaccgagtcggtgc

SEQ ID NO: 227 - RNA, 84 nt, synthetic construct
  source 1..84: mol_type = other RNA
gttttagtactctgtaatgaaaattacagaatctactaaaacaaggcaaaatgccgtgtttatctcgtcaacttgttggcgaga

SEQ ID NO: 228 - RNA, 97 nt, synthetic construct
  source 1..97: mol_type = other RNA
gttctgtcttttggtcaggacaaccgtctagctataagtgctgcagggtgtgagaaactcctattgctggacgatgtctcttacgaggcattagcac

SEQ ID NO: 229 - RNA, 88 nt, synthetic construct
  source 1..88: mol_type = other RNA
gacctatagggtcaatgaatctgtgcgtgtgccataagtaattaaaaattacccaccacaggagcacctgaaaacaggtgcttggcac

SEQ ID NO: 230 - RNA, 80 nt, synthetic construct
  source 1..80: mol_type = other RNA
gttttagagctagaaatagcaagttaaaataaggctagtccgttatcaacttgaaaaagtgggaccgagtcggtgctttt

SEQ ID NO: 231 - DNA, 4104 bp, Streptococcus pyogenes
  source 1..4104: mol_type = genomic DNA
atggataagaaatactcaataggcttagatatcggcacaaatagcgtcggatgggcggtgatcactgatgattataaggttccgtctaaaaagttcaaggttctgggaaatacagaccgccacagtatcaaaaaaaatcttataggggctcttttatttggcagtggagagacagcggaagcgactcgtctcaaacggacagctcgtagaaggtatacacgtcggaagaatcgtatttgttatctacaggagattttttcaaatgagatggcgaaagtagatgatagtttctttcatcgacttgaagagtcttttttggtggaagaagacaagaagcatgaacgtcatcctatttttggaaatatagtagatgaagttgcttatcatgagaaatatccaactatctatcatctgcgaaaaaaattggcagattctactgataaagcggatttgcgcttaatctatttggccttagcgcatatgattaagtttcgtggtcattttttgattgagggagatttaaatcctgataatagtgatgtggacaaactatttatccagttggtacaaatctacaatcaattatttgaagaaaaccctattaacgcaagtagagtagatgctaaagcgattctttctgcacgattgagtaaatcaagacgattagaaaatctcattgctcagctccccggtgagaagagaaatggcttgtttgggaatctcattgctttgtcattgggattgacccctaattttaaatcaaattttgatttggcagaagatgctaaattacagctttcaaaagatacttacgatgatgatttagataatttattggcgcaaattggagatcaatatgctgatttgtttttggcagctaagaatttatcagatgctattttactttcagatatcctaagagtaaatagtgaaataactaaggctcccctatcagcttcaatgattaagcgctacgatgaacatcatcaagacttgactcttttaaaagctttagttcgacaacaacttccagaaaagtataaagaaatcttttttgatcaatcaaaaaacggatatgcaggttatattgatgggggagctagccaagaagaattttataaatttatcaaaccaattttagaaaaaatggatggtactgaggaattattggtgaaactaaatcgtgaagatttgctgcgcaagcaacggacctttgacaacggctctattccccatcaaattcacttgggtgagctgcatgctattttgagaagacaagaagacttttatccatttttaaaagacaatcgtgagaagattgaaaaaatcttgacttttcgaattccttattatgttggtccattggcgcgtggcaatagtcgttttgcatggatgactcggaagtctgaagaaacaattaccccatggaattttgaagaagttgtcgataaaggtgcttcagctcaatcatttattgaacgcatgacaaactttgataaaaatcttccaaatgaaaaagtactaccaaaacatagtttgctttatgagtattttacggtttataacgaattgacaaaggtcaaatatgttactgagggaatgcgaaaaccagcatttctttcaggtgaacagaagaaagccattgttgatttactcttcaaaacaaatcgaaaagtaaccgttaagcaattaaaagaagattatttcaaaaaaatagaatgttttgatagtgttgaaatttcaggagttgaagatagatttaatgcttcattaggcgcctaccatgatttgctaaaaattattaaagataaagattttttggataatgaagaaaatgaagatatcttagaggatattgttttaacattgaccttatttgaagatagggggatgattgaggaaagacttaaaacatatgctcacctctttgatgataaggtgatgaaacagcttaaacgtcgccgttatactggttggggacgtttgtctcgaaaattgattaatggtattagggataagcaatctggcaaaacaatattagattttttgaaatcagatggttttgccaatcgcaattttatgcagctgatccatgatgatagtttgacatttaaagaagatattcaaaaagcacaggtgtctggacaaggccatagtttacatgaacagattgctaacttagctggcagtcctgctattaaaaaaggtattttacagactgtaaaaattgttgatgaactggtcaaagtaatggggcataagccagaaaatatcgttattgaaatggcacgtgaaaatcagacaactcaaaagggccagaaaaattcgcgagagcgtatgaaacgaatcgaagaaggtatcaaagaattaggaagtcagattcttaaagagcatcctgttgaaaatactcaattgcaaaatgaaaagctctatctctattatctacaaaatggaagagacatgtatgtggaccaagaattagatattaatcgtttaagtgattatgatgtcgatcacattgttccacaaagtttcattaaagacgattcaatagacaataaggtactaacgcgttctgataaaaatcgtggtaaatcggataacgttccaagtgaagaagtagtcaaaaagatgaaaaactattggagacaacttctaaacgccaagttaatcactcaacgtaagtttgataatttaacgaaagctgaacgtggaggtttgagtgaacttgataaagctggttttatcaaacgccaattggttgaaactcgccaaatcactaagcatgtggcacaaattttggatagtcgcatgaatactaaatacgatgaaaatgataaacttattcgagaggttaaagtgattaccttaaaatctaaattagtttctgacttccgaaaagatttccaattctataaagtacgtgagattaacaattaccatcatgcccatgatgcgtatctaaatgccgtcgttggaactgctttgattaagaaatatccaaaacttgaatcggagtttgtctatggtgattataaagtttatgatgttcgtaaaatgattgctaagtctgagcaagaaataggcaaagcaaccgcaaaatatttcttttactctaatatcatgaacttcttcaaaacagaaattacacttgcaaatggagagattcgcaaacgccctctaatcgaaactaatggggaaactggagaaattgtctgggataaagggcgagattttgccacagtgcgcaaagtattgtccatgccccaagtcaatattgtcaagaaaacagaagtacagacaggcggattctccaaggagtcaattttaccaaaaagaaattcggacaagcttattgctcgtaaaaaagactgggatccaaaaaaatatggtggttttgatagtccaacggtagcttattcagtcctagtggttgctaaggtggaaaaagggaaatcgaagaagttaaaatccgttaaagagttactagggatcacaattatggaaagaagttcctttgaaaaaaatccgattgactttttagaagctaaaggatataaggaagttaaaaaagacttaatcattaaactacctaaatatagtctttttgagttagaaaacggtcgtaaacggatgctggctagtgccggagaattacaaaaaggaaatgagctggctctgccaagcaaatatgtgaattttttatatttagctagtcattatgaaaagttgaagggtagtccagaagataacgaacaaaaacaattgtttgtggagcagcataagcattatttagatgagattattgagcaaatcagtgaattttctaagcgtgttattttagcagatgccaatttagataaagttcttagtgcatataacaaacatagagacaaaccaatacgtgaacaagcagaaaatattattcatttatttacgttgacgaatcttggagctcccgctgcttttaaatattttgatacaacaattgatcgtaaacgatatacgtctacaaaagaagttttagatgccactcttatccatcaatccatcactggtctttatgaaacacgcattgatttgagtcagctaggaggtgactga

SEQ ID NO: 232 - protein, 1367 aa, Streptococcus pyogenes
MDKKYSIGLDIGTNSVGWAVITDDYKVPSKKFKVLGNTDRHSIKKNLIGALLFGSGETAEATRLKRTARRRYTRRKNRICYLQEIFSNEMAKVDDSFFHRLEESFLVEEDKKHERHPIFGNIVDEVAYHEKYPTIYHLRKKLADSTDKADLRLIYLALAHMIKFRGHFLIEGDLNPDNSDVDKLFIQLVQIYNQLFEENPINASRVDAKAILSARLSKSRRLENLIAQLPGEKRNGLFGNLIALSLGLTPNFKSNFDLAEDAKLQLSKDTYDDDLDNLLAQIGDQYADLFLAAKNLSDAILLSDILRVNSEITKAPLSASMIKRYDEHHQDLTLLKALVRQQLPEKYKEIFFDQSKNGYAGYIDGGASQEEFYKFIKPILEKMDGTEELLVKLNREDLLRKQRTFDNGSIPHQIHLGELHAILRRQEDFYPFLKDNREKIEKILTFRIPYYVGPLARGNSRFAWMTRKSEETITPWNFEEVVDKGASAQSFIERMTNFDKNLPNEKVLPKHSLLYEYFTVYNELTKVKYVTEGMRKPAFLSGEQKKAIVDLLFKTNRKVTVKQLKEDYFKKIECFDSVEISGVEDRFNASLGAYHDLLKIIKDKDFLDNEENEDILEDIVLTLTLFEDRGMIEERLKTYAHLFDDKVMKQLKRRRYTGWGRLSRKLINGIRDKQSGKTILDFLKSDGFANRNFMQLIHDDSLTFKEDIQKAQVSGQGHSLHEQIANLAGSPAIKKGILQTVKIVDELVKVMGHKPENIVIEMARENQTTQKGQKNSRERMKRIEEGIKELGSQILKEHPVENTQLQNEKLYLYYLQNGRDMYVDQELDINRLSDYDVDHIVPQSFIKDDSIDNKVLTRSDKNRGKSDNVPSEEVVKKMKNYWRQLLNAKLITQRKFDNLTKAERGGLSELDKAGFIKRQLVETRQITKHVAQILDSRMNTKYDENDKLIREVKVITLKSKLVSDFRKDFQFYKVREINNYHHAHDAYLNAVVGTALIKKYPKLESEFVYGDYKVYDVRKMIAKSEQEIGKATAKYFFYSNIMNFFKTEITLANGEIRKRPLIETNGETGEIVWDKGRDFATVRKVLSMPQVNIVKKTEVQTGGFSKESILPKRNSDKLIARKKDWDPKKYGGFDSPTVAYSVLVVAKVEKGKSKKLKSVKELLGITIMERSSFEKNPIDFLEAKGYKEVKKDLIIKLPKYSLFELENGRKRMLASAGELQKGNELALPSKYVNFLYLASHYEKLKGSPEDNEQKQLFVEQHKHYLDEIIEQISEFSKRVILADANLDKVLSAYNKHRDKPIREQAENIIHLFTLTNLGAPAAFKYFDTTIDRKRYTSTKEVLDATLIHQSITGLYETRIDLSQLGGD

SEQ ID NO: 233 - DNA, 4212 bp, unidentified
  source 1..4212: mol_type = unassigned DNA
atggataaaaagtattctattggtttagacatcggcactaattccgttggatgggctgtcataaccgatgaatacaaagtaccttcaaagaaatttaaggtgttggggaacacagaccgtcattcgattaaaaagaatcttatcggtgccctcctattcgatagtggcgaaacggcagaggcgactcgcctgaaacgaaccgctcggagaaggtatacacgtcgcaagaaccgaatatgttacttacaagaaatttttagcaatgagatggccaaagttgacgattctttctttcaccgtttggaagagtccttccttgtcgaagaggacaagaaacatgaacggcaccccatctttggaaacatagtagatgaggtggcatatcatgaaaagtacccaacgatttatcacctcagaaaaaagctagttgactcaactgataaagcggacctgaggttaatctacttggctcttgcccatatgataaagttccgtgggcactttctcattgagggtgatctaaatccggacaactcggatgtcgacaaactgttcatccagttagtacaaacctataatcagttgtttgaagagaaccctataaatgcaagtggcgtggatgcgaaggctattcttagcgcccgcctctctaaatcccgacggctagaaaacctgatcgcacaattacccggagagaagaaaaatgggttgttcggtaaccttatagcgctctcactaggcctgacaccaaattttaagtcgaacttcgacttagctgaagatgccaaattgcagcttagtaaggacacgtacgatgacgatctcgacaatctactggcacaaattggagatcagtatgcggacttatttttggctgccaaaaaccttagcgatgcaatcctcctatctgacatactgagagttaatactgagattaccaaggcgccgttatccgcttcaatgatcaaaaggtacgatgaacatcaccaagacttgacacttctcaaggccctagtccgtcagcaactgcctgagaaatataaggaaatattctttgatcagtcgaaaaacgggtacgcaggttatattgacggcggagcgagtcaagaggaattctacaagtttatcaaacccatattagagaagatggatgggacggaagagttgcttgtaaaactcaatcgcgaagatctactgcgaaagcagcggactttcgacaacggtagcattccacatcaaatccacttaggcgaattgcatgctatacttagaaggcaggaggatttttatccgttcctcaaagacaatcgtgaaaagattgagaaaatcctaacctttcgcataccttactatgtgggacccctggcccgagggaactctcggttcgcatggatgacaagaaagtccgaagaaacgattactccatggaattttgaggaagttgtcgataaaggtgcgtcagctcaatcgttcatcgagaggatgaccaactttgacaagaatttaccgaacgaaaaagtattgcctaagcacagtttactttacgagtatttcacagtgtacaatgaactcacgaaagttaagtatgtcactgagggcatgcgtaaacccgcctttctaagcggagaacagaagaaagcaatagtagatctgttattcaagaccaaccgcaaagtgacagttaagcaattgaaagaggactactttaagaaaattgaatgcttcgattctgtcgagatctccggggtagaagatcgatttaatgcgtcacttggtacgtatcatgacctcctaaagataattaaagataaggacttcctggataacgaagagaatgaagatatcttagaagatatagtgttgactcttaccctctttgaagatcgggaaatgattgaggaaagactaaaaacatacgctcacctgttcgacgataaggttatgaaacagttaaagaggcgtcgctatacgggctggggacgattgtcgcggaaacttatcaacgggataagagacaagcaaagtggtaaaactattctcgattttctaaagagcgacggcttcgccaataggaactttatgcagctgatccatgatgactctttaaccttcaaagaggatatacaaaaggcacaggtttccggacaaggggactcattgcacgaacatattgcgaatcttgctggttcgccagccatcaaaaagggcatactccagacagtcaaagtagtggatgagctagttaaggtcatgggacgtcacaaaccggaaaacattgtaatcgagatggcacgcgaaaatcaaacgactcagaaggggcaaaaaaacagtcgagagcggatgaagagaatagaagagggtattaaagaactgggcagccagatcttaaaggagcatcctgtggaaaatacccaattgcagaacgagaaactttacctctattacctacaaaatggaagggacatgtatgttgatcaggaactggacataaaccgtttatctgattacgacgtcgatcacattgtaccccaatcctttttgaaggacgattcaatcgacaataaagtgcttacacgctcggataagaaccgagggaaaagtgacaatgttccaagcgaggaagtcgtaaagaaaatgaagaactattggcggcagctcctaaatgcgaaactgataacgcaaagaaagttcgataacttaactaaagctgagaggggtggcttgtctgaacttgacaaggccggatttattaaacgtcagctcgtggaaacccgccaaatcacaaagcatgttgcacagatactagattcccgaatgaatacgaaatacgacgagaacgataagctgattcgggaagtcaaagtaatcactttaaagtcaaaattggtgtcggacttcagaaaggattttcaattctataaagttagggagataaataactaccaccatgcgcacgacgcttatcttaatgccgtcgtagggaccgcactcattaagaaatacccgaagctagaaagtgagtttgtgtatggtgattacaaagtttatgacgtccgtaagatgatcgcgaaaagcgaacaggagataggcaaggctacagccaaatacttcttttattctaacattatgaatttctttaagacggaaatcactctggcaaacggagagatacgcaaacgacctttaattgaaaccaatggggagacaggtgaaatcgtatgggataagggccgggacttcgcgacggtgagaaaagttttgtccatgccccaagtcaacatagtaaagaaaactgaggtgcagaccggagggttttcaaaggaatcgattcttccaaaaaggaatagtgataagctcatcgctcgtaaaaaggactgggacccgaaaaagtacggtggcttcgatagccctacagttgcctattctgtcctagtagtggcaaaagttgagaagggaaaatccaagaaactgaagtcagtcaaagaattattggggataacgattatggagcgctcgtcttttgaaaagaaccccatcgacttccttgaggcgaaaggttacaaggaagtaaaaaaggatctcataattaaactaccaaagtatagtctgtttgagttagaaaatggccgaaaacggatgttggctagcgccggagagcttcaaaaggggaacgaactcgcactaccgtctaaatacgtgaatttcctgtatttagcgtcccattacgagaagttgaaaggttcacctgaagataacgaacagaagcaactttttgttgagcagcacaaacattatctcgacgaaatcatagagcaaatttcggaattcagtaagagagtcatcctagctgatgccaatctggacaaagtattaagcgcatacaacaagcacagggataaacccatacgtgagcaggcggaaaatattatccatttgtttactcttaccaacctcggcgctccagccgcattcaagtattttgacacaacgatagatcgcaaacgatacacttctaccaaggaggtgctagacgcgacactgattcaccaatccatcacgggattatatgaaactcggatagatttgtcacagcttgggggtgacggatcccccaagaagaagaggaaagtctcgagcgactacaaagaccatgacggtgattataaagatcatgacatcgattacaaggatgacgatgacaaggctgcagga

SEQ ID NO: 234 - protein, 1368 aa, unidentified
MDKKYSIGLAIGTNSVGWAVITDEYKVPSKKFKVLGNTDRHSIKKNLIGALLFDSGETAEATRLKRTARRRYTRRKNRICYLQEIFSNEMAKVDDSFFHRLEESFLVEEDKKHERHPIFGNIVDEVAYHEKYPTIYHLRKKLVDSTDKADLRLIYLALAHMIKFRGHFLIEGDLNPDNSDVDKLFIQLVQTYNQLFEENPINASGVDAKAILSARLSKSRRLENLIAQLPGEKKNGLFGNLIALSLGLTPNFKSNFDLAEDAKLQLSKDTYDDDLDNLLAQIGDQYADLFLAAKNLSDAILLSDILRVNTEITKAPLSASMIKRYDEHHQDLTLLKALVRQQLPEKYKEIFFDQSKNGYAGYIDGGASQEEFYKFIKPILEKMDGTEELLVKLNREDLLRKQRTFDNGSIPHQIHLGELHAILRRQEDFYPFLKDNREKIEKILTFRIPYYVGPLARGNSRFAWMTRKSEETITPWNFEEVVDKGASAQSFIERMTNFDKNLPNEKVLPKHSLLYEYFTVYNELTKVKYVTEGMRKPAFLSGEQKKAIVDLLFKTNRKVTVKQLKEDYFKKIECFDSVEISGVEDRFNASLGTYHDLLKIIKDKDFLDNEENEDILEDIVLTLTLFEDREMIEERLKTYAHLFDDKVMKQLKRRRYTGWGRLSRKLINGIRDKQSGKTILDFLKSDGFANRNFMQLIHDDSLTFKEDIQKAQVSGQGDSLHEHIANLAGSPAIKKGILQTVKVVDELVKVMGRHKPENIVIEMARENQTTQKGQKNSRERMKRIEEGIKELGSQILKEHPVENTQLQNEKLYLYYLQNGRDMYVDQELDINRLSDYDVDHIVPQSFLKDDSIDNKVLTRSDKNRGKSDNVPSEEVVKKMKNYWRQLLNAKLITQRKFDNLTKAERGGLSELDKAGFIKRQLVETRQITKHVAQILDSRMNTKYDENDKLIREVKVITLKSKLVSDFRKDFQFYKVREINNYHHAHDAYLNAVVGTALIKKYPKLESEFVYGDYKVYDVRKMIAKSEQEIGKATAKYFFYSNIMNFFKTEITLANGEIRKRPLIETNGETGEIVWDKGRDFATVRKVLSMPQVNIVKKTEVQTGGFSKESILPKRNSDKLIARKKDWDPKKYGGFDSPTVAYSVLVVAKVEKGKSKKLKSVKELLGITIMERSSFEKNPIDFLEAKGYKEVKKDLIIKLPKYSLFELENGRKRMLASAGELQKGNELALPSKYVNFLYLASHYEKLKGSPEDNEQKQLFVEQHKHYLDEIIEQISEFSKRVILADANLDKVLSAYNKHRDKPIREQAENIIHLFTLTNLGAPAAFKYFDTTIDRKRYTSTKEVLDATLIHQSITGLYETRIDLSQLGGD

SEQ ID NO: 235 - DNA, 4212 bp, unidentified; identical to SEQ ID NO: 233
  source 1..4212: mol_type = unassigned DNA

SEQ ID NO: 236 - protein, 1368 aa, unidentified; identical to SEQ ID NO: 234

SEQ ID NO: 237 - DNA, 4107 bp, Streptococcus pyogenes
  source 1..4107: mol_type = genomic DNA
atggataagaaatactcaataggcttagatatcggcacaaatagcgtcggatgggcggtgatcactgatgaatataaggttccgtctaaaaagttcaaggttctgggaaatacagaccgccacagtatcaaaaaaaatcttataggggctcttttatttgacagtggagagacagcggaagcgactcgtctcaaacggacagctcgtagaaggtatacacgtcggaagaatcgtatttgttatctacaggagattttttcaaatgagatggcgaaagtagatgatagtttctttcatcgacttgaagagtcttttttggtggaagaagacaagaagcatgaacgtcatcctatttttggaaatatagtagatgaagttgcttatcatgagaaatatccaactatctatcatctgcgaaaaaaattggtagattctactgataaagcggatttgcgcttaatctatttggccttagcgcatatgattaagtttcgtggtcattttttgattgagggagatttaaatcctgataatagtgatgtggacaaactatttatccagttggtacaaacctacaatcaattatttgaagaaaaccctattaacgcaagtggagtagatgctaaagcgattctttctgcacgattgagtaaatcaagacgattagaaaatctcattgctcagctccccggtgagaagaaaaatggcttatttgggaatctcattgctttgtcattgggtttgacccctaattttaaatcaaattttgatttggcagaagatgctaaattacagctttcaaaagatacttacgatgatgatttagataatttattggcgcaaattggagatcaatatgctgatttgtttttggcagctaagaatttatcagatgctattttactttcagatatcctaagagtaaatactgaaataactaaggctcccctatcagcttcaatgattaaacgctacgatgaacatcatcaagacttgactcttttaaaagctttagttcgacaacaacttccagaaaagtataaagaaatcttttttgatcaatcaaaaaacggatatgcaggttatattgatgggggagctagccaagaagaattttataaatttatcaaaccaattttagaaaaaatggatggtactgaggaattattggtgaaactaaatcgtgaagatttgctgcgcaagcaacggacctttgacaacggctctattccccatcaaattcacttgggtgagctgcatgctattttgagaagacaagaagacttttatccatttttaaaagacaatcgtgagaagattgaaaaaatcttgacttttcgaattccttattatgttggtccattggcgcgtggcaatagtcgttttgcatggatgactcggaagtctgaagaaacaattaccccatggaattttgaagaagttgtcgataaaggtgcttcagctcaatcatttattgaacgcatgacaaactttgataaaaatcttccaaatgaaaaagtactaccaaaacatagtttgctttatgagtattttacggtttataacgaattgacaaaggtcaaatatgttactgaaggaatgcgaaaaccagcatttctttcaggtgaacagaagaaagccattgttgatttactcttcaaaacaaatcgaaaagtaaccgttaagcaattaaaagaagattatttcaaaaaaatagaatgttttgatagtgttgaaatttcaggagttgaagatagatttaatgcttcattaggtacctaccatgatttgctaaaaattattaaagataaagattttttggataatgaagaaaatgaagatatcttagaggatattgttttaacattgaccttatttgaagatagggagatgattgaggaaagacttaaaacatatgctcacctctttgatgataaggtgatgaaacagcttaaacgtcgccgttatactggttggggacgtttgtctcgaaaattgattaatggtattagggataagcaatctggcaaaacaatattagattttttgaaatcagatggttttgccaatcgcaattttatgcagctgatccatgatgatagtttgacatttaaagaagacattcaaaaagcacaagtgtctggacaaggcgatagtttacatgaacatattgcaaatttagctggtagccctgctattaaaaaaggtattttacagactgtaaaagttgttgatgaattggtcaaagtaatggggcggcataagccagaaaatatcgttattgaaatggcacgtgaaaatcagacaactcaaaagggccagaaaaattcgcgagagcgtatgaaacgaatcgaagaaggtatcaaagaattaggaagtcagattcttaaagagcatcctgttgaaaatactcaattgcaaaatgaaaagctctatctctattatctccaaaatggaagagacatgtatgtggaccaagaattagatattaatcgtttaagtgattatgatgtcgatcacattgttccacaaagtttccttaaagacgattcaatagacaataaggtcttaacgcgttctgataaaaatcgtggtaaatcggataacgttccaagtgaagaagtagtcaaaaagatgaaaaactattggagacaacttctaaacgccaagttaatcactcaacgtaagtttgataatttaacgaaagctgaacgtggaggtttgagtgaacttgataaagctggttttatcaaacgccaattggttgaaactcgccaaatcactaagcatgtggcacaaattttggatagtcgcatgaatactaaatacgatgaaaatgataaacttattcgagaggttaaagtgattaccttaaaatctaaattagtttctgacttccgaaaagatttccaattctataaagtacgtgagattaacaattaccatcatgcccatgatgcgtatctaaatgccgtcgttggaactgctttgattaagaaatatccaaaacttgaatcggagtttgtctatggtgattataaagtttatgatgttcgtaaaatgattgctaagtctgagcaagaaataggcaaagcaaccgcaaaatatttcttttactctaatatcatgaacttcttcaaaacagaaattacacttgcaaatggagagattcgcaaacgccctctaatcgaaactaatggggaaactggagaaattgtctgggataaagggcgagattttgccacagtgcgcaaagtattgtccatgccccaagtcaatattgtcaagaaaacagaagtacagacaggcggattctccaaggagtcaattttaccaaaaagaaattcggacaagcttattgctcgtaaaaaagactgggatccaaaaaaatatggtggttttgatagtccaacggtagcttattcagtcctagtggttgctaaggtggaaaaagggaaatcgaagaagttaaaatccgttaaagagttactagggatcacaattatggaaagaagttcctttgaaaaaaatccgattgactttttagaagctaaaggatataaggaagttaaaaaagacttaatcattaaactacctaaatatagtctttttgagttagaaaacggtcgtaaacggatgctggctagtgccggagaattacaaaaaggaaatgagctggctctgccaagcaaatatgtgaattttttatatttagctagtcattatgaaaagttgaagggtagtccagaagataacgaacaaaaacaattgtttgtggagcagcataagcattatttagatgagattattgagcaaatcagtgaattttctaagcgtgttattttagcagatgccaatttagataaagttcttagtgcatataacaaacatagagacaaaccaatacgtgaacaagcagaaaatattattcatttatttacgttgacgaatcttggagctcccgctgcttttaaatattttgatacaacaattgatcgtaaacgatatacgtctacaaaagaagttttagatgccactcttatccatcaatccatcactggtctttatgaaacacgcattgatttgagtcagctaggaggtgactga

SEQ ID NO: 238 - protein, 1368 aa, unidentified
MDKKYSIGLAIGTNSVGWAVITDEYKVPSKKFKVLGNTDRHSIKKNLIGALLFDSGETAEATRLKRTARRRYTRRKNRICYLQEIFSNEMAKVDDSFFHRLEESFLVEEDKKHERHPIFGNIVDEVAYHEKYPTIYHLRKKLVDSTDKADLRLIYLALAHMIKFRGHFLIEGDLNPDNSDVDKLFIQLVQTYNQLFEENPINASGVDAKAILSARLSKSRRLENLIAQLPGEKKNGLFGNLIALSLGLTPNFKSNFDLAEDAKLQLSKDTYDDDLDNLLAQIGDQYADLFLAAKNLSDAILLSDILRVNTEITKAPLSASMIKRYDEHHQDLTLLKALVRQQLPEKYKEIFFDQSKNGYAGYIDGGASQEEFYKFIKPILEKMDGTEELLVKLNREDLLRKQRTFDNGSIPHQIHLGELHAILRRQEDFYPFLKDNREKIEKILTFRIPYYVGPLARGNSRFAWMTRKSEETITPWNFEEVVDKGASAQSFIERMTNFDKNLPNEKVLPKHSLLYEYFTVYNELTKVKYVTEGMRKPAFLSGEQKKAIVDLLFKTNRKVTVKQLKEDYFKKIECFDSVEISGVEDRFNASLGTYHDLLKIIKDKDFLDNEENEDILEDIVLTLTLFEDREMIEERLKTYAHLFDDKVMKQLKRRRYTGWGRLSRKLINGIRDKQSGKTILDFLKSDGFANRNFMQLIHDDSLTFKEDIQKAQVSGQGDSLHEHIANLAGSPAIKKGILQTVKVVDELVKVMGRHKPENIVIEMARENQTTQKGQKNSRERMKRIEEGIKELGSQILKEHPVENTQLQNEKLYLYYLQNGRDMYVDQELDINRLSDYDVDAIVPQSFLKDDSIDNKVLTRSDKNRGKSDNVPSEEVVKKMKNYWRQLLNAKLITQRKFDNLTKAERGGLSELDKAGFIKRQLVETRQITKHVAQILDSRMNTKYDENDKLIREVKVITLKSKLVSDFRKDFQFYKVREINNYHHAHDAYLNAVVGTALIKKYPKLESEFVYGDYKVYDVRKMIAKSEQEIGKATAKYFFYSNIMNFFKTEITLANGEIRKRPLIETNGETGEIVWDKGRDFATVRKVLSMPQVNIVKKTEVQTGGFSKESILPKRNSDKLIARKKDWDPKKYGGFDSPTVAYSVLVVAKVEKGKSKKLKSVKELLGITIMERSSFEKNPIDFLEAKGYKEVKKDLIIKLPKYSLFELENGRKRMLASAGELQKGNELALPSKYVNFLYLASHYEKLKGSPEDNEQKQLFVEQHKHYLDEIIEQISEFSKRVILADANLDKVLSAYNKHRDKPIREQAENIIHLFTLTNLGAPAAFKYFDTTIDRKRYTSTKEVLDATLIHQSITGLYETRIDLSQLGGD

SEQ ID NO: 239 - protein, 345 aa, Sulfolobus islandicus
MEVPLYNIFGDNYIIQVATEAENSTIYNNKVEIDDEELRNVLNLAYKIAKNNEDAAAERRGKAKKKKGEEGETTTSNIILPLSGNDKNPWTETLKCYNFPTTVALSEVFKNFSQVKECEEVSAPSFVKPEFYEFGRSPGMVERTRRVKLEVEPHYLIIAAAGWVLTRLGKAKVSEGDYVGVNVFTPTRGILYSLIQNVNGIVPGIKPETAFGLWIARKVVSSVTNPNVSVVRIYTISDAVGQNPTTINGGFSIDLTKLLEKRYLLSERLEAIARNALSISSNMRERYIVLANYIYEYLTGSKRLEDLLYFANRDLIMNLNSDDGKVRDLKLISAYVNGELIRGEG

SEQ ID NO: 240 - protein, 345 aa, Sulfolobus islandicus
MEVPLYNIFGDNYIIQVATEAENSTIYNNKVEIDDEELRNVLNLAYKIAKNNEDAAAERRGKAKKKKGEEGETTTSNIILPLSGNDKNPWTETLKCYNFPTTVALSEVFKNFSQVKECEEVSAPSFVKPEFYKFGRSPGMVERTRRVKLEVEPHYLIMAAAGWVLTRLGKAKVSEGDYVGVNVFTPTRGILYSLIQNVNGIVPGIKPETAFGLWIARKVVSSVTNPNVSVVSIYTISDAVGQNPTTINGGFSIDLTKLLEKRDLLSERLEAIARNALSISSNMRERYIVLANYIYEYLTGSKRLEDLLYFANRDLIMNLNSDDGKVRDLKLISAYVNGELIRGEG

SEQ ID NO: 241 - protein, 987 aa, unidentified
MEKRINKIRKKLSADNATKPVSRSGPMKTLLVRVMTDDLKKRLEKRRKKPEVMPQVISNNAANNLRMLLDDYTKMKEAILQVYWQEFKDDHVGLMCKFAQPASKKIDQNKLKPEMDEKGNLTTAGFACSQCGQPLFVYKLEQVSEKGKAYTNYFGRCNVAEHEKLILLAQLKPVKDSDEAVTYSLGKFGQRALDFYSIHVTKESTHPVKPLAQIAGNRYASGPVGKALSDACMGTIASFLSKYQDIIIEHQKVVKGNQKRLESLRELAGKENLEYPSVTLPPQPHTKEGVDFAYNEVIARVRMWVNLNLWQKLKLSRDDAKPLLRLKGFPSFPVVERRENEVDWWNTINEVKKLIDAKRDMGRVFWSGVTAEKRNTILEGYNYLPNENDHKKREGSLENPKKPAKRQFGDLLLYLEKKYAGDWGKVFDEAWERIDKKIAGLTSHIEREEARNAEDAQSKAVLTDWLRAKASFVLERLKEMDEKEFYACEIQLQKWYGDLRGNPFAVEAENRVVDISGFSIGSDGHSIQYRNLLAWKYLENGKREFYLLMNYGKKGRIRFTDGTDIKKSGKWQGLLYGGGKAKVIDLTFDPDDEQLIILPLAFGTRQGREFIWNDLLSLETGLIKLANGRVIEKTIYNKKIGRDEPALFVALTFERREVVDPSNIKPVNLIGVARGENIPAVIALTDPEGCPLPEFKDSSGGPTDILRIGEGYKEKQRAIQAAKEVEQRRAGGYSRKFASKSRNLADDMVRNSARDLFYHAVTHDAVLVFANLSRGFGRQGKRTFMTERQYTKMEDWLTAKLAYEGLTSKTYLSKTLAQYTSKTCSNCGFTITYADMDVMLVRLKKTSDGWATTLNNKELKAEYQITYYNRYKRQTVEKELSAELDRLSEESGNNDISKWTKGRRDEALFLLKKRFSHRPVQEQFVCLDCGHEVHAAEQAALNIARSWLFLNSNSTEFKSYKSGKQPFVGAWQAFYKRRLKEVWKPNA

SEQ ID NO: 242 - protein, 1210 aa, unidentified
MSKRHPRISGVKGYRLHAQRLEYTGKSGAMRTIKYPLYSSPSGGRTVPREIVSAINDDYVGLYGLSNFDDLYNAEKRNEEKVYSVLDFWYDCVQYGAVFSYTAPGLLKNVAEVRGGSYELTKTLKGSHLYDELQIDKVIKFLNKKEISRANGSLDKLKKDIIDCFKAEYRERHKDQCNKLADDIKNAKKDAGASLGERQKKLFRDFFGISEQSENDKPSFTNPLNLTCCLLPFDTVNNNRNRGEVLFNKLKEYAQKLDKNEGSLEMWEYIGIGNSGTAFSNFLGEGFLGRLRENKITELKKAMMDITDAWRGQEQEEELEKRLRILAALTIKLREPKFDNHWGGYRSDINGKLSSWLQNYINQTVKIKEDLKGHKKDLKKAKEMINRFGESDTKEEAVVSSLLESIEKIVPDDSADDEKPDIPAIAIYRRFLSDGRLTLNRFVQREDVQEALIKERLEAEKKKKPKKRKKKSDAEDEKETIDFKELFPHLAKPLKLVPNFYGDSKRELYKKYKNAAIYTDALWKAVEKIYKSAFSSSLKNSFFDTDFDKDFFIKRLQKIFSVYRRFNTDKWKPIVKNSFAPYCDIVSLAENEVLYKPKQSRSRKSAAIDKNRVRLPSTENIAKAGIALARELSVAGFDWKDLLKKEEHEEYIDLIELHKTALALLLAVTETQLDISALDFVENGTVKDFMKTRDGNLVLEGRFLEMFSQSIVFSELRGLAGLMSRKEFITRSAIQTMNGKQAELLYIPHEFQSAKITTPKEMSRAFLDLAPAEFATSLEPESLSEKSLLKLKQMRYYPHYFGYELTRTGQGIDGGVAENALRLEKSPVKKREIKCKQYKTLGRGQNKIVLYVRSSYYQTQFLEWFLHRPKNVQTDVAVSGSFLIDEKKVKTRWNYDALTVALEPVSGSERVFVSQPFTIFPEKSAEEEGQRYLGIDIGEYGIAYTALEITGDSAKILDQNFISDPQLKTLREEVKGLKLDQRRGTFAMPSTKIARIRESLVHSLRNRIHHLALKHKAKIVYELEVSRFEEGKQKIKKVYATLKKADVYSEIDADKNLQTTVWGKLAVASEISASYTSQFCGACKKLWRAEMQVDETITTQELIGTVRVIKGGTLIDAIKDFMRPPIFDENDTPFPKYRDFCDKHHISKKMRGNSCLFICPFCRANADADIQASQTIALLRYVKEEKKVEDYFERFRKLKNIKVLGQMKKI

SEQ ID NO: 243 - RNA, 117 nt, synthetic construct
  source 1..117: mol_type = other RNA
  misc_difference 98: note = a, c, u, g, unknown, or other
  misc_difference 99: note = a, c, u, g, unknown, or other
  misc_difference 100: note = a, c, u, g, unknown, or other
  misc_difference 101: note = a, c, u, g, unknown, or other
  misc_difference 102: note = a, c, u, g, unknown, or other
  misc_difference 103: note = a, c, u, g, unknown, or other
  misc_difference 104: note = a, c, u, g, unknown, or other
  misc_difference 105: note = a, c, u, g, unknown, or other
  misc_difference 106: note = a, c, u, g, unknown, or other
  misc_difference 107: note = a, c, u, g, unknown, or other
  misc_difference 108: note = a, c, u, g, unknown, or other
  misc_difference 109: note = a, c, u, g, unknown, or other
  misc_difference 110: note = a, c, u, g, unknown, or other
  misc_difference 111: note = a, c, u, g, unknown, or other
  misc_difference 112: note = a, c, u, g, unknown, or other
  misc_difference 113: note = a, c, u, g, unknown, or other
  misc_difference 114: note = a, c, u, g, unknown, or other
  misc_difference 115: note = a, c, u, g, unknown, or other
  misc_difference 116: note = a, c, u, g, unknown, or other
  misc_difference 117: note = a, c, u, g, unknown, or other
gttctgtcttttggtcaggacaaccgtctagctataagtgctgcagggtgtgagaaactcctattgctggacgatgtctcttacgaggcattagcacnnnnnnnnnnnnnnnnnnnn

SEQ ID NO: 244 - RNA, 108 nt, synthetic construct
  source 1..108: mol_type = other RNA
  misc_difference 89: note = a, c, u, g, unknown, or other
  misc_difference 90: note = a, c, u, g, unknown, or other
  misc_difference 91: note = a, c, u, g, unknown, or other
  misc_difference 92: note = a, c, u, g, unknown, or other
  misc_difference 93: note = a, c, u, g, unknown, or other
  misc_difference 94: note = a, c, u, g, unknown, or other
  misc_difference 95: note = a, c, u, g, unknown, or other
  misc_difference 96: note = a, c, u, g, unknown, or other
  misc_difference 97: note = a, c, u, g, unknown, or other
  misc_difference 98: note = a, c, u, g, unknown, or other
  misc_difference 99: note = a, c, u, g, unknown, or other
  misc_difference 100: note = a, c, u, g, unknown, or other
  misc_difference 101: note = a, c, u, g, unknown, or other
  misc_difference 102: note = a, c, u, g, unknown, or other
  misc_difference 103: note = a, c, u, g, unknown, or other
  misc_difference 104: note = a, c, u, g, unknown, or other
  misc_difference 105: note = a, c, u, g, unknown, or other
  misc_difference 106: note = a, c, u, g, unknown, or other
  misc_difference 107: note = a, c, u, g, unknown, or other
  misc_difference 108: note = a, c, u, g, unknown, or other
gacctatagggtcaatgaatctgtgcgtgtgccataagtaattaaaaattacccaccacaggagcacctgaaaacaggtgcttggcacnnnnnnnnnnnnnnnnnnnn

SEQ ID NO: 245 - RNA, 119 nt, synthetic construct
  source 1..119: mol_type = other RNA
  misc_difference 100: note = a, c, u, g, unknown, or other
  misc_difference 101: note = a, c, u, g, unknown, or other
  misc_difference 102: note = a, c, u, g, unknown, or other
  misc_difference 103: note = a, c, u, g, unknown, or other
  misc_difference 104: note = a, c, u, g, unknown, or other
  misc_difference 105: note = a, c, u, g, unknown, or other
  misc_difference 106: note = a, c, u, g, unknown, or other
  misc_difference 107: note = a, c, u, g, unknown, or other
  misc_difference 108: note = a, c, u, g, unknown, or other
  misc_difference 109: note = a, c, u, g, unknown, or other
  misc_difference 110: note = a, c, u, g, unknown, or other
  misc_difference 111: note = a, c, u, g, unknown, or other
  misc_difference 112: note = a, c, u, g, unknown, or other
  misc_difference 113: note = a, c, u, g, unknown, or other
  misc_difference 114: note = a, c, u, g, unknown, or other
  misc_difference 115: note = a, c, u, g, unknown, or other
  misc_difference 116: note = a, c, u, g, unknown, or other
  misc_difference 117: note = a, c, u, g, unknown, or other
  misc_difference 118: note = a, c, u, g, unknown, or other
  misc_difference 119: note = a, c, u, g, unknown, or other
gtctaaaggacagaatttttcaacgggtgtgccaatggccactttccaggtggcaaagcccgttgaacttctcaaaaagaacgatctgagaagtggcacnnnnnnnnnnnnnnnnnnnn

SEQ ID NO: 246 - protein, 1300 aa, unidentified
MSIYQEFVNKYSLSKTLRFELIPQGKTLENIKARGLILDDEKRAKDYKKAKQIIDKYHQFFIEEILSSVCISEDLLQNYSDVYFKLKKSDDDNLQKDFKSAKDTIKKQISEYIKDSEKFKNLFNQNLIDAKKGQESDLILWLKQSKDNGIELFKANSDITDIDEALEIIKSFKGWTTYFKGFHENRKNVYSSNDIPTSIIYRIVDDNLPKFLENKAKYESLKDKAPEAINYEQIKKDLAEELTFDIDYKTSEVNQRVFSLDEVFEIANFNNYLNQSGITKFNTIIGGKFVNGENTKRKGINEYINLYSQQINDKTLKKYKMSVLFKQILSDTESKSFVIDKLEDDSDVVTTMQSFYEQIAAFKTVEEKSIKETLSLLFDDLKAQKLDLSKIYFKNDKSLTDLSQQVFDDYSVIGTAVLEYITQQIAPKNLDNPSKKEQELIAKKTEKAKYLSLETIKLALEEFNKHRDIDKQCRFEEILANFAAIPMIFDEIAQNKDNLAQISIKYQNQGKKDLLQASAEDDVKAIKDLLDQTNNLLHKLKIFHISQSEDKANILDKDEHFYLVFEECYFELANIVPLYNKIRNYITQKPYSDEKFKLNFENSTLANGWDKNKEPDNTAILFIKDDKYYLGVMNKKNNKIFDDKAIKENKGEGYKKIVYKLLPGANKMLPKVFFSAKSIKFYNPSEDILRIRNHSTHTKNGSPQKGYEKFEFNIEDCRKFIDFYKQSISKHPEWKDFGFRFSDTQRYNSIDEFYREVENQGYKLTFENISESYIDSVVNQGKLYLFQIYNKDFSAYSKGRPNLHTLYWKALFDERNLQDVVYKLNGEAELFYRKQSIPKKITHPAKEAIANKNKDNPKKESVFEYDLIKDKRFTEDKFFFHCPITINFKSSGANKFNDEINLLLKEKANDVHILSIDRGERHLAYYTLVDGKGNIIKQDTFNIIGNDRMKTNYHDKLAAIEKDRDSARKDWKKINNIKEMKEGYLSQVVHEIAKLVIEYNAIVVFEDLNFGFKRGRFKVEKQVYQKLEKMLIEKLNYLVFKDNEFDKTGGVLRAYQLTAPFETFKKMGKQTGIIYYVPAGFTSKICPVTGFVNQLYPKYESVSKSQEFFSKFDKICYNLDKGYFEFSFDYKNFGDKAAKGKWTIASFGSRLINFRNSDKNHNWDTREVYPTKELEKLLKDYSIEYGHGECIKAAICGESDKKFFAKLTSVLNTILQMRNSKTGTELDYLISPVADVNGNFFDSRQAPKNMPQDADANGAYHIGLKGLMLLGRIKNNQEGKKLNLVIKNEEYFEFVQNRNN

SEQ ID NO: 247 - protein, 1300 aa, synthetic construct
MSIYQEFVNKYSLSKTLRFELIPQGKTLENIKARGLILDDEKRAKDYKKAKQIIDKYHQFFIEEILSSVCISEDLLQNYSDVYFKLKKSDDDNLQKDFKSAKDTIKKQISEYIKDSEKFKNLFNQNLIDAKKGQESDLILWLKQSKDNGIELFKANSDITDIDEALEIIKSFKGWTTYFKGFHENRKNVYSSNDIPTSIIYRIVDDNLPKFLENKAKYESLKDKAPEAINYEQIKKDLAEELTFDIDYKTSEVNQRVFSLDEVFEIANFNNYLNQSGITKFNTIIGGKFVNGENTKRKGINEYINLYSQQINDKTLKKYKMSVLFKQILSDTESKSFVIDKLEDDSDVVTTMQSFYEQIAAFKTVEEKSIKETLSLLFDDLKAQKLDLSKIYFKNDKSLTDLSQQVFDDYSVIGTAVLEYITQQIAPKNLDNPSKKEQELIAKKTEKAKYLSLETIKLALEEFNKHRDIDKQCRFEEILANFAAIPMIFDEIAQNKDNLAQISIKYQNQGKKDLLQASAEDDVKAIKDLLDQTNNLLHKLKIFHISQSEDKANILDKDEHFYLVFEECYFELANIVPLYNKIRNYITQKPYSDEKFKLNFENSTLANGWDKNKEPDNTAILFIKDDKYYLGVMNKKNNKIFDDKAIKENKGEGYKKIVYKLLPGANKMLPKVFFSAKSIKFYNPSEDILRIRNHSTHTKNGSPQKGYEKFEFNIEDCRKFIDFYKQSISKHPEWKDFGFRFSDTQRYNSIDEFYREVENQGYKLTFENISESYIDSVVNQGKLYLFQIYNKDFSAYSKGRPNLHTLYWKALFDERNLQDVVYKLNGEAELFYRKQSIPKKITHPAKEAIANKNKDNPKKESVFEYDLIKDKRFTEDKFFFHCPITINFKSSGANKFNDEINLLLKEKANDVHILSIARGERHLAYYTLVDGKGNIIKQDTFNIIGNDRMKTNYHDKLAAIEKDRDSARKDWKKINNIKEMKEGYLSQVVHEIAKLVIEYNAIVVFEDLNFGFKRGRFKVEKQVYQKLEKMLIEKLNYLVFKDNEFDKTGGVLRAYQLTAPFETFKKMGKQTGIIYYVPAGFTSKICPVTGFVNQLYPKYESVSKSQEFFSKFDKICYNLDKGYFEFSFDYKNFGDKAAKGKWTIASFGSRLINFRNSDKNHNWDTREVYPTKELEKLLKDYSIEYGHGECIKAAICGESDKKFFAKLTSVLNTILQMRNSKTGTELDYLISPVADVNGNFFDSRQAPKNMPQDADANGAYHIGLKGLMLLGRIKNNQEGKKLNLVIKNEEYFEFVQNRNN

SEQ ID NO: 248 - protein, 1300 aa, synthetic construct
MSIYQEFVNKYSLSKTLRFELIPQGKTLENIKARGLILDDEKRAKDYKKAKQIIDKYHQFFIEEILSSVCISEDLLQNYSDVYFKLKKSDDDNLQKDFKSAKDTIKKQISEYIKDSEKFKNLFNQNLIDAKKGQESDLILWLKQSKDNGIELFKANSDITDIDEALEIIKSFKGWTTYFKGFHENRKNVYSSNDIPTSIIYRIVDDNLPKFLENKAKYESLKDKAPEAINYEQIKKDLAEELTFDIDYKTSEVNQRVFSLDEVFEIANFNNYLNQSGITKFNTIIGGKFVNGENTKRKGINEYINLYSQQINDKTLKKYKMSVLFKQILSDTESKSFVIDKLEDDSDVVTTMQSFYEQIAAFKTVEEKSIKETLSLLFDDLKAQKLDLSKIYFKNDKSLTDLSQQVFDDYSVIGTAVLEYITQQIAPKNLDNPSKKEQELIAKKTEKAKYLSLETIKLALEEFNKHRDIDKQCRFEEILANFAAIPMIFDEIAQNKDNLAQISIKYQNQGKKDLLQASAEDDVKAIKDLLDQTNNLLHKLKIFHISQSEDKANILDKDEHFYLVFEECYFELANIVPLYNKIRNYITQKPYSDEKFKLNFENSTLANGWDKNKEPDNTAILFIKDDKYYLGVMNKKNNKIFDDKAIKENKGEGYKKIVYKLLPGANKMLPKVFFSAKSIKFYNPSEDILRIRNHSTHTKNGSPQKGYEKFEFNIEDCRKFIDFYKQSISKHPEWKDFGFRFSDTQRYNSIDEFYREVENQGYKLTFENISESYIDSVVNQGKLYLFQIYNKDFSAYSKGRPNLHTLYWKALFDERNLQDVVYKLNGEAELFYRKQSIPKKITHPAKEAIANKNKDNPKKESVFEYDLIKDKRFTEDKFFFHCPITINFKSSGANKFNDEINLLLKEKANDVHILSIDRGERHLAYYTLVDGKGNIIKQDTFNIIGNDRMKTNYHDKLAAIEKDRDSARKDWKKINNIKEMKEGYLSQVVHEIAKLVIEYNAIVVFADLNFGFKRGRFKVEKQVYQKLEKMLIEKLNYLVFKDNEFDKTGGVLRAYQLTAPFETFKKMGKQTGIIYYVPAGFTSKICPVTGFVNQLYPKYESVSKSQEFFSKFDKICYNLDKGYFEFSFDYKNFGDKAAKGKWTIASFGSRLINFRNSDKNHNWDTREVYPTKELEKLLKDYSIEYGHGECIKAAICGESDKKFFAKLTSVLNTILQMRNSKTGTELDYLISPVADVNGNFFDSRQAPKNMPQDADANGAYHIGLKGLMLLGRIKNNQEGKKLNLVIKNEEYFEFVQNRNN

SEQ ID NO: 249 - protein, 1300 aa, synthetic construct
MSIYQEFVNKYSLSKTLRFELIPQGKTLENIKARGLILDDEKRAKDYKKAKQIIDKYHQFFIEEILSSVCISEDLLQNYSDVYFKLKKSDDDNLQKDFKSAKDTIKKQISEYIKDSEKFKNLFNQNLIDAKKGQESDLILWLKQSKDNGIELFKANSDITDIDEALEIIKSFKGWTTYFKGFHENRKNVYSSNDIPTSIIYRIVDDNLPKFLENKAKYESLKDKAPEAINYEQIKKDLAEELTFDIDYKTSEVNQRVFSLDEVFEIANFNNYLNQSGITKFNTIIGGKFVNGENTKRKGINEYINLYSQQINDKTLKKYKMSVLFKQILSDTESKSFVIDKLEDDSDVVTTMQSFYEQIAAFKTVEEKSIKETLSLLFDDLKAQKLDLSKIYFKNDKSLTDLSQQVFDDYSVIGTAVLEYITQQIAPKNLDNPSKKEQELIAKKTEKAKYLSLETIKLALEEFNKHRDIDKQCRFEEILANFAAIPMIFDEIAQNKDNLAQISIKYQNQGKKDLLQASAEDDVKAIKDLLDQTNNLLHKLKIFHISQSEDKANILDKDEHFYLVFEECYFELANIVPLYNKIRNYITQKPYSDEKFKLNFENSTLANGWDKNKEPDNTAILFIKDDKYYLGVMNKKNNKIFDDKAIKENKGEGYKKIVYKLLPGANKMLPKVFFSAKSIKFYNPSEDILRIRNHSTHTKNGSPQKGYEKFEFNIEDCRKFIDFYKQSISKHPEWKDFGFRFSDTQRYNSIDEFYREVENQGYKLTFENISESYIDSVVNQGKLYLFQIYNKDFSAYSKGRPNLHTLYWKALFDERNLQDVVYKLNGEAELFYRKQSIPKKITHPAKEAIANKNKDNPKKESVFEYDLIKDKRFTEDKFFFHCPITINFKSSGANKFNDEINLLLKEKANDVHILSIDRGERHLAYYTLVDGKGNIIKQDTFNIIGNDRMKTNYHDKLAAIEKDRDSARKDWKKINNIKEMKEGYLSQVVHEIAKLVIEYNAIVVFEDLNFGFKRGRFKVEKQVYQKLEKMLIEKLNYLVFKDNEFDKTGGVLRAYQLTAPFETFKKMGKQTGIIYYVPAGFTSKICPVTGFVNQLYPKYESVSKSQEFFSKFDKICYNLDKGYFEFSFDYKNFGDKAAKGKWTIASFGSRLINFRNSDKNHNWDTREVYPTKELEKLLKDYSIEYGHGECIKAAICGESDKKFFAKLTSVLNTILQMRNSKTGTELDYLISPVADVNGNFFDSRQAPKNMPQDAAANGAYHIGLKGLMLLGRIKNNQEGKKLNLVIKNEEYFEFVQNRNN

SEQ ID NO: 250 - protein, 1300 aa, synthetic construct
MSIYQEFVNKYSLSKTLRFELIPQGKTLENIKARGLILDDEKRAKDYKKAKQIIDKYHQFFIEEILSSVCISEDLLQNYSDVYFKLKKSDDDNLQKDFKSAKDTIKKQISEYIKDSEKFKNLFNQNLIDAKKGQESDLILWLKQSKDNGIELFKANSDITDIDEALEIIKSFKGWTTYFKGFHENRKNVYSSNDIPTSIIYRIVDDNLPKFLENKAKYESLKDKAPEAINYEQIKKDLAEELTFDIDYKTSEVNQRVFSLDEVFEIANFNNYLNQSGITKFNTIIGGKFVNGENTKRKGINEYINLYSQQINDKTLKKYKMSVLFKQILSDTESKSFVIDKLEDDSDVVTTMQSFYEQIAAFKTVEEKSIKETLSLLFDDLKAQKLDLSKIYFKNDKSLTDLSQQVFDDYSVIGTAVLEYITQQIAPKNLDNPSKKEQELIAKKTEKAKYLSLETIKLALEEFNKHRDIDKQCRFEEILANFAAIPMIFDEIAQNKDNLAQISIKYQNQGKKDLLQASAEDDVKAIKDLLDQTNNLLHKLKIFHISQSEDKANILDKDEHFYLVFEECYFELANIVPLYNKIRNYITQKPYSDEKFKLNFENSTLANGWDKNKEPDNTAILFIKDDKYYLGVMNKKNNKIFDDKAIKENKGEGYKKIVYKLLPGANKMLPKVFFSAKSIKFYNPSEDILRIRNHSTHTKNGSPQKGYEKFEFNIEDCRKFIDFYKQSISKHPEWKDFGFRFSDTQRYNSIDEFYREVENQGYKLTFENISESYIDSVVNQGKLYLFQIYNKDFSAYSKGRPNLHTLYWKALFDERNLQDVVYKLNGEAELFYRKQSIPKKITHPAKEAIANKNKDNPKKESVFEYDLIKDKRFTEDKFFFHCPITINFKSSGANKFNDEINLLLKEKANDVHILSIARGERHLAYYTLVDGKGNIIKQDTFNIIGNDRMKTNYHDKLAAIEKDRDSARKDWKKINNIKEMKEGYLSQVVHEIAKLVIEYNAIVVFADLNFGFKRGRFKVEKQVYQKLEKMLIEKLNYLVFKDNEFDKTGGVLRAYQLTAPFETFKKMGKQTGIIYYVPAGFTSKICPVTGFVNQLYPKYESVSKSQEFFSKFDKICYNLDKGYFEFSFDYKNFGDKAAKGKWTIASFGSRLINFRNSDKNHNWDTREVYPTKELEKLLKDYSIEYGHGECIKAAICGESDKKFFAKLTSVLNTILQMRNSKTGTELDYLISPVADVNGNFFDSRQAPKNMPQDADANGAYHIGLKGLMLLGRIKNNQEGKKLNLVIKNEEYFEFVQNRNN

SEQ ID NO: 251 - protein, 1300 aa, synthetic construct
MSIYQEFVNKYSLSKTLRFELIPQGKTLENIKARGLILDDEKRAKDYKKAKQIIDKYHQFFIEEILSSVCISEDLLQNYSDVYFKLKKSDDDNLQKDFKSAKDTIKKQISEYIKDSEKFKNLFNQNLIDAKKGQESDLILWLKQSKDNGIELFKANSDITDIDEALEIIKSFKGWTTYFKGFHENRKNVYSSNDIPTSIIYRIVDDNLPKFLENKAKYESLKDKAPEAINYEQIKKDLAEELTFDIDYKTSEVNQRVFSLDEVFEIANFNNYLNQSGITKFNTIIGGKFVNGENTKRKGINEYINLYSQQINDKTLKKYKMSVLFKQILSDTESKSFVIDKLEDDSDVVTTMQSFYEQIAAFKTVEEKSIKETLSLLFDDLKAQKLDLSKIYFKNDKSLTDLSQQVFDDYSVIGTAVLEYITQQIAPKNLDNPSKKEQELIAKKTEKAKYLSLETIKLALEEFNKHRDIDKQCRFEEILANFAAIPMIFDEIAQNKDNLAQISIKYQNQGKKDLLQASAEDDVKAIKDLLDQTNNLLHKLKIFHISQSEDKANILDKDEHFYLVFEECYFELANIVPLYNKIRNYITQKPYSDEKFKLNFENSTLANGWDKNKEPDNTAILFIKDDKYYLGVMNKKNNKIFDDKAIKENKGEGYKKIVYKLLPGANKMLPKVFFSAKSIKFYNPSEDILRIRNHSTHTKNGSPQKGYEKFEFNIEDCRKFIDFYKQSISKHPEWKDFGFRFSDTQRYNSIDEFYREVENQGYKLTFENISESYIDSVVNQGKLYLFQIYNKDFSAYSKGRPNLHTLYWKALFDERNLQDVVYKLNGEAELFYRKQSIPKKITHPAKEAIANKNKDNPKKESVFEYDLIKDKRFTEDKFFFHCPITINFKSSGANKFNDEINLLLKEKANDVHILSIARGERHLAYYTLVDGKGNIIKQDTFNIIGNDRMKTNYHDKLAAIEKDRDSARKDWKKINNIKEMKEGYLSQVVHEIAKLVIEYNAIVVFEDLNFGFKRGRFKVEKQVYQKLEKMLIEKLNYLVFKDNEFDKTGGVLRAYQLTAPFETFKKMGKQTGIIYYVPAGFTSKICPVTGFVNQLYPKYESVSKSQEFFSKFDKICYNLDKGYFEFSFDYKNFGDKAAKGKWTIASFGSRLINFRNSDKNHNWDTREVYPTKELEKLLKDYSIEYGHGECIKAAICGESDKKFFAKLTSVLNTILQMRNSKTGTELDYLISPVADVNGNFFDSRQAPKNMPQDAAANGAYHIGLKGLMLLGRIKNNQEGKKLNLVIKNEEYFEFVQNRNN

SEQ ID NO: 252 - protein, 1300 aa, synthetic construct
MSIYQEFVNKYSLSKTLRFELIPQGKTLENIKARGLILDDEKRAKDYKKAKQIIDKYHQFFIEEILSSVCISEDLLQNYSDVYFKLKKSDDDNLQKDFKSAKDTIKKQISEYIKDSEKFKNLFNQNLIDAKKGQESDLILWLKQSKDNGIELFKANSDITDIDEALEIIKSFKGWTTYFKGFHENRKNVYSSNDIPTSIIYRIVDDNLPKFLENKAKYESLKDKAPEAINYEQIKKDLAEELTFDIDYKTSEVNQRVFSLDEVFEIANFNNYLNQSGITKFNTIIGGKFVNGENTKRKGINEYINLYSQQINDKTLKKYKMSVLFKQILSDTESKSFVIDKLEDDSDVVTTMQSFYEQIAAFKTVEEKSIKETLSLLFDDLKAQKLDLSKIYFKNDKSLTDLSQQVFDDYSVIGTAVLEYITQQIAPKNLDNPSKKEQELIAKKTEKAKYLSLETIKLALEEFNKHRDIDKQCRFEEILANFAAIPMIFDEIAQNKDNLAQISIKYQNQGKKDLLQASAEDDVKAIKDLLDQTNNLLHKLKIFHISQSEDKANILDKDEHFYLVFEECYFELANIVPLYNKIRNYITQKPYSDEKFKLNFENSTLANGWDKNKEPDNTAILFIKDDKYYLGVMNKKNNKIFDDKAIKENKGEGYKKIVYKLLPGANKMLPKVFFSAKSIKFYNPSEDILRIRNHSTHTKNGSPQKGYEKFEFNIEDCRKFIDFYKQSISKHPEWKDFGFRFSDTQRYNSIDEFYREVENQGYKLTFENISESYIDSVVNQGKLYLFQIYNKDFSAYSKGRPNLHTLYWKALFDERNLQDVVYKLNGEAELFYRKQSIPKKITHPAKEAIANKNKDNPKKESVFEYDLIKDKRFTEDKFFFHCPITINFKSSGANKFNDEINLLLKEKANDVHILSIDRGERHLAYYTLVDGKGNIIKQDTFNIIGNDRMKTNYHDKLAAIEKDRDSARKDWKKINNIKEMKEGYLSQVVHEIAKLVIEYNAIVVFADLNFGFKRGRFKVEKQVYQKLEKMLIEKLNYLVFKDNEFDKTGGVLRAYQLTAPFETFKKMGKQTGIIYYVPAGFTSKICPVTGFVNQLYPKYESVSKSQEFFSKFDKICYNLDKGYFEFSFDYKNFGDKAAKGKWTIASFGSRLINFRNSDKNHNWDTREVYPTKELEKLLKDYSIEYGHGECIKAAICGESDKKFFAKLTSVLNTILQMRNSKTGTELDYLISPVADVNGNFFDSRQAPKNMPQDAAANGAYHIGLKGLMLLGRIKNNQEGKKLNLVIKNEEYFEFVQNRNN

SEQ ID NO: 253 - protein, 1300 aa, synthetic construct
MSIYQEFVNKYSLSKTLRFELIPQGKTLENIKARGLILDDEKRAKDYKKAKQIIDKYHQFFIEEILSSVCISEDLLQNYSDVYFKLKKSDDDNLQKDFKSAKDTIKKQISEYIKDSEKFKNLFNQNLIDAKKGQESDLILWLKQSKDNGIELFKANSDITDIDEALEIIKSFKGWTTYFKGFHENRKNVYSSNDIPTSIIYRIVDDNLPKFLENKAKYESLKDKAPEAINYEQIKKDLAEELTFDIDYKTSEVNQRVFSLDEVFEIANFNNYLNQSGITKFNTIIGGKFVNGENTKRKGINEYINLYSQQINDKTLKKYKMSVLFKQILSDTESKSFVIDKLEDDSDVVTTMQSFYEQIAAFKTVEEKSIKETLSLLFDDLKAQKLDLSKIYFKNDKSLTDLSQQVFDDYSVIGTAVLEYITQQIAPKNLDNPSKKEQELIAKKTEKAKYLSLETIKLALEEFNKHRDIDKQCRFEEILANFAAIPMIFDEIAQNKDNLAQISIKYQNQGKKDLLQASAEDDVKAIKDLLDQTNNLLHKLKIFHISQSEDKANILDKDEHFYLVFEECYFELANIVPLYNKIRNYITQKPYSDEKFKLNFENSTLANGWDKNKEPDNTAILFIKDDKYYLGVMNKKNNKIFDDKAIKENKGEGYKKIVYKLLPGANKMLPKVFFSAKSIKFYNPSEDILRIRNHSTHTKNGSPQKGYEKFEFNIEDCRKFIDFYKQSISKHPEWKDFGFRFSDTQRYNSIDEFYREVENQGYKLTFENISESYIDSVVNQGKLYLFQIYNKDFSAYSKGRPNLHTLYWKALFDERNLQDVVYKLNGEAELFYRKQSIPKKITHPAKEAIANKNKDNPKKESVFEYDLIKDKRFTEDKFFFHCPITINFKSSGANKFNDEINLLLKEKANDVHILSIARGERHLAYYTLVDGKGNIIKQDTFNIIGNDRMKTNYHDKLAAIEKDRDSARKDWKKINNIKEMKEGYLSQVVHEIAKLVIEYNAIVVFADLNFGFKRGRFKVEKQVYQKLEKMLIEKLNYLVFKDNEFDKTGGVLRAYQLTAPFETFKKMGKQTGIIYYVPAGFTSKICPVTGFVNQLYPKYESVSKSQEFFSKFDKICYNLDKGYFEFSFDYKNFGDKAAKGKWTIASFGSRLINFRNSDKNHNWDTREVYPTKELEKLLKDYSIEYGHGECIKAAICGESDKKFFAKLTSVLNTILQMRNSKTGTELDYLISPVADVNGNFFDSRQAPKNMPQDAAANGAYHIGLKGLMLLGRIKNNQEGKKLNLVIKNEEYFEFVQNRNN

SEQ ID NO: 254 - protein, 1052 aa, synthetic construct
KRNYILGLDIGITSVGYGIIDYETRDVIDAGVRLFKEANVENNEGRRSKRGARRLKRRRRHRIQRVKKLLFDYNLLTDHSELSGINPYEARVKGLSQKLSEEEFSAALLHLAKRRGVHNVNEVEEDTGNELSTKEQISRNSKALEEKYVAELQLERLKKDGEVRGSINRFKTSDYVKEAKQLLKVQKAYHQLDQSFIDTYIDLLETRRTYYEGPGEGSPFGWKDIKEWYEMLMGHCTYFPEELRSVKYAYNADLYNALNDLNNLVITRDENEKLEYYEKFQIIENVFKQKKKPTLKQIAKEILVNEEDIKGYRVTSTGKPEFTNLKVYHDIKDITARKEIIENAELLDQIAKILTIYQSSEDIQEELTNLNSELTQEEIEQISNLKGYTGTHNLSLKAINLILDELWHTNDNQIAIFNRLKLVPKKVDLSQQKEIPTTLVDDFILSPVVKRSFIQSIKVINAIIKKYGLPNDIIIELAREKNSKDAQKMINEMQKRNRQTNERIEEIIRTTGKENAKYLIEKIKLHDMQEGKCLYSLEAIPLEDLLNNPFNYEVDHIIPRSVSFDNSFNNKVLVKQEENSKKGNRTPFQYLSSSDSKISYETFKKHILNLAKGKGRISKTKKEYLLEERDINRFSVQKDFINRNLVDTRYATRGLMNLLRSYFRVNNLDVKVKSINGGFTSFLRRKWKFKKERNKGYKHHAEDALIIANADFIFKEWKKLDKAKKVMENQMFEEKQAESMPEIETEQEYKEIFITPHQIKHIKDFKDYKYSHRVDKKPNRELINDTLYSTRKDDKGNTLIVNNLNGLYDKDNDKLKKLINKSPEKLLMYHHDPQTYQKLKLIMEQYGDEKNPLYKYYEETGNYLTKYSKKDNGPVIKKIKYYGNKLNAHLDITDDYPNSRNKVVKLSLKPYRFDVYLDNGVYKFVTVKNLDVIKKENYYEVNSKCYEEAKKLKKISNQAEFIASFYNNDLIKINGELYRVIGVNNDLLNRIEVNMIDITYREYLENMNDKRPPRIIKTIASKTQSIKKYSTDILGNLYEVKSKKHPQIIKKG

SEQ ID NO: 255 - protein, 1052 aa, synthetic construct
KRNYILGLDIGITSVGYGIIDYETRDVIDAGVRLFKEANVENNEGRRSKRGARRLKRRRRHRIQRVKKLLFDYNLLTDHSELSGINPYEARVKGLSQKLSEEEFSAALLHLAKRRGVHNVNEVEEDTGNELSTKEQISRNSKALEEKYVAELQLERLKKDGEVRGSINRFKTSDYVKEAKQLLKVQKAYHQLDQSFIDTYIDLLETRRTYYEGPGEGSPFGWKDIKEWYEMLMGHCTYFPEELRSVKYAYNADLYNALNDLNNLVITRDENEKLEYYEKFQIIENVFKQKKKPTLKQIAKEILVNEEDIKGYRVTSTGKPEFTNLKVYHDIKDITARKEIIENAELLDQIAKILTIYQSSEDIQEELTNLNSELTQEEIEQISNLKGYTGTHNLSLKAINLILDELWHTNDNQIAIFNRLKLVPKKVDLSQQKEIPTTLVDDFILSPVVKRSFIQSIKVINAIIKKYGLPNDIIIELAREKNSKDAQKMINEMQKRNRQTNERIEEIIRTTGKENAKYLIEKIKLHDMQEGKCLYSLEAIPLEDLLNNPFNYEVDHIIPRSVSFDNSFNNKVLVKQEEASKKGNRTPFQYLSSSDSKISYETFKKHILNLAKGKGRISKTKKEYLLEERDINRFSVQKDFINRNLVDTRYATRGLMNLLRSYFRVNNLDVKVKSINGGFTSFLRRKWKFKKERNKGYKHHAEDALIIANADFIFKEWKKLDKAKKVMENQMFEEKQAESMPEIETEQEYKEIFITPHQIKHIKDFKDYKYSHRVDKKPNRELINDTLYSTRKDDKGNTLIVNNLNGLYDKDNDKLKKLINKSPEKLLMYHHDPQTYQKLKLIMEQYGDEKNPLYKYYEETGNYLTKYSKKDNGPVIKKIKYYGNKLNAHLDITDDYPNSRNKVVKLSLKPYRFDVYLDNGVYKFVTVKNLDVIKKENYYEVNSKCYEEAKKLKKISNQAEFIASFYNNDLIKINGELYRVIGVNNDLLNRIEVNMIDITYREYLENMNDKRPPRIIKTIASKTQSIKKYSTDILGNLYEVKSKKHPQIIKKG

SEQ ID NO: 256 - protein, 1052 aa, synthetic construct
KRNYILGLDIGITSVGYGIIDYETRDVIDAGVRLFKEANVENNEGRRSKRGARRLKRRRRHRIQRVKKLLFDYNLLTDHSELSGINPYEARVKGLSQKLSEEEFSAALLHLAKRRGVHNVNEVEEDTGNELSTKEQISRNSKALEEKYVAELQLERLKKDGEVRGSINRFKTSDYVKEAKQLLKVQKAYHQLDQSFIDTYIDLLETRRTYYEGPGEGSPFGWKDIKEWYEMLMGHCTYFPEELRSVKYAYNADLYNALNDLNNLVITRDENEKLEYYEKFQIIENVFKQKKKPTLKQIAKEILVNEEDIKGYRVTSTGKPEFTNLKVYHDIKDITARKEIIENAELLDQIAKILTIYQSSEDIQEELTNLNSELTQEEIEQISNLKGYTGTHNLSLKAINLILDELWHTNDNQIAIFNRLKLVPKKVDLSQQKEIPTTLVDDFILSPVVKRSFIQSIKVINAIIKKYGLPNDIIIELAREKNSKDAQKMINEMQKRNRQTNERIEEIIRTTGKENAKYLIEKIKLHDMQEGKCLYSLEAIPLEDLLNNPFNYEVDHIIPRSVSFDNSFNNKVLVKQEEASKKGNRTPFQYLSSSDSKISYETFKKHILNLAKGKGRISKTKKEYLLEERDINRFSVQKDFINRNLVDTRYATRGLMNLLRSYFRVNNLDVKVKSINGGFTSFLRRKWKFKKERNKGYKHHAEDALIIANADFIFKEWKKLDKAKKVMENQMFEEKQAESMPEIETEQEYKEIFITPHQIKHIKDFKDYKYSHRVDKKPNRKLINDTLYSTRKDDKGNTLIVNNLNGLYDKDNDKLKKLINKSPEKLLMYHHDPQTYQKLKLIMEQYGDEKNPLYKYYEETGNYLTKYSKKDNGPVIKKIKYYGNKLNAHLDITDDYPNSRNKVVKLSLKPYRFDVYLDNGVYKFVTVKNLDVIKKENYYEVNSKCYEEAKKLKKISNQAEFIASFYKNDLIKINGELYRVIGVNNDLLNRIEVNMIDITYREYLENMNDKRPPHIIKTIASKTQSIKKYSTDILGNLYEVKSKKHPQIIKKG

SEQ ID NO: 257 - protein, 1410 aa, synthetic construct
EIGKATAKYFFYSNIMNFFKTEITLANGEIRKRPLIETNGETGEIVWDKGRDFATVRKVLSMPQVNIVKKTEVQTGGFSKESILPKRNSDKLIARKKDWDPKKYGGFMQPTVAYSVLVVAKVEKGKSKKLKSVKELLGITIMERSSFEKNPIDFLEAKGYKEVKKDLIIKLPKYSLFELENGRKRMLASAKFLQKGNELALPSKYVNFLYLASHYEKLKGSPEDNEQKQLFVEQHKHYLDEIIEQISEFSKRVILADANLDKVLSAYNKHRDKPIREQAENIIHLFTLTNLGAPRAFKYFDTTIARKEYRSTKEVLDATLIHQSITGLYETRIDLSQLGGDGGSGGSGGSGGSGGSGGSGGMDKKYSIGLAIGTNSVGWAVITDEYKVPSKKFKVLGNTDRHSIKKNLIGALLFDSGETAEATRLKRTARRRYTRRKNRICYLQEIFSNEMAKVDDSFFHRLEESFLVEEDKKHERHPIFGNIVDEVAYHEKYPTIYHLRKKLVDSTDKADLRLIYLALAHMIKFRGHFLIEGDLNPDNSDVDKLFIQLVQTYNQLFEENPINASGVDAKAILSARLSKSRRLENLIAQLPGEKKNGLFGNLIALSLGLTPNFKSNFDLAEDAKLQLSKDTYDDDLDNLLAQIGDQYADLFLAAKNLSDAILLSDILRVNTEITKAPLSASMIKRYDEHHQDLTLLKALVRQQLPEKYKEIFFDQSKNGYAGYIDGGASQEEFYKFIKPILEKMDGTEELLVKLNREDLLRKQRTFDNGSIPHQIHLGELHAILRRQEDFYPFLKDNREKIEKILTFRIPYYVGPLARGNSRFAWMTRKSEETITPWNFEEVVDKGASAQSFIERMTNFDKNLPNEKVLPKHSLLYEYFTVYNELTKVKYVTEGMRKPAFLSGEQKKAIVDLLFKTNRKVTVKQLKEDYFKKIECFDSVEISGVEDRFNASLGTYHDLLKIIKDKDFLDNEENEDILEDIVLTLTLFEDREMIEERLKTYAHLFDDKVMKQLKRRRYTGWGRLSRKLINGIRDKQSGKTILDFLKSDGFANRNFMQLIHDDSLTFKEDIQKAQVSGQGDSLHEHIANLAGSPAIKKGILQTVKVVDELVKVMGRHKPENIVIEMARENQTTQKGQKNSRERMKRIEEGIKELGSQILKEHPVENTQLQNEKLYLYYLQNGRDMYVDQELDINRLSDYDVDHIVPQSFLKDDSIDNKVLTRSDKNRGKSDNVPSEEVVKKMKNYWRQLLNAKLITQRKFDNLTKAERGGLSELDKAGFIKRQLVETRQITKHVAQILDSRMNTKYDENDKLIREVKVITLKSKLVSDFRKDFQFYKVREINNYHHAHDAYLNAVVGTALIKKYPKLESEFVYGDYKVYDVRKMIAKSEQEGADKRTADGSEFESPKKKRKV

SEQ ID NO: 258 - protein, 1129 aa, synthetic construct
MAVKSIKVKLRLDDMPEIRAGLWKLHKEVNAGVRYYTEWLSLLRQENLYRRSPNGDGEQECDKTAEECKAELLERLRARQVENGHRGPAGSDDELLQLARQLYELLVPQAIGAKGDAQQIARKFLSPLADKDAVGGLGIAKAGNKPRWVRMREAGEPGWEEEKEKAETRKSADRTADVLRALADFGLKPLMRVYTDSEMSSVEWKPLRKGQAVRTWDRDMFQQAIERMMSWESWNQRVGQEYAKLVEQKNRFEQKNFVGQEHLVHLVNQLQQDMKEASPGLESKEQTAHYVTGRALRGSDKVFEKWGKLAPDAPFDLYDAEIKNVQRRNTRRFGSHDLFAKLAEPEYQALWREDASFLTRYAVYNSILRKLNHAKMFATFTLPDATAHPIWTRFDKLGGNLHQYTFLFNEFGERRHAIRFHKLLKVENGVAREVDDVTVPISMSEQLDNLLPRDPNEPIALYFRDYGAEQHFTGEFGGAKIQCRRDQLAHMHRRRGARDVYLNVSVRVQSQSEARGERRPPYAAVFRLVGDNHRAFVHFDKLSDYLAEHPDDGKLGSEGLLSGLRVMSVDLGLRTSASISVFRVARKDELKPNSKGRVPFFFPIKGNDNLVAVHERSQLLKLPGETESKDLRAIREERQRTLRQLRTQLAYLRLLVRCGSEDVGRRERSWAKLIEQPVDAANHMTPDWREAFENELQKLKSLHGICSDKEWMDAVYESVRRVWRHMGKQVRDWRKDVRSGERPKIRGYAKDVVGGNSIEQIEYLERQYKFLKSWSFFGKVSGQVIRAEKGSRFAITLREHIDHAKEDRLKKLADRIIMEALGYVYALDERGKGKWVAKYPPCQLILLEELSEYQFNNDRPPSENNQLMQWSHRGVFQELINQAQVHDLLVGTMYAAFSSRFDARTGAPGIRCRRVPARCTQEHNPEPFPWWLNKFVVEHTLDACPLRADDLIPTGEGEIFVSPFSAEEGDFHQIHADLNAAQNLQQRLWSDFDISQIRLRCDWGEVDGELVLIPRLTGKRTADSYSNKVFYTNTGVTYYERERGKKRRKVFAQEKLSEEEAELLVEADEAREKSVVLMRDPSGIINRGNWTRQKEFWSMVNQRIEGYLVKQIRSRVPLQDSACENTGDI

SEQ ID NO: 259 - protein, 1129 aa, Alicyclobacillus acidiphilus
MAVKSMKVKLRLDNMPEIRAGLWKLHTEVNAGVRYYTEWLSLLRQENLYRRSPNGDGEQECYKTAEECKAELLERLRARQVENGHCGPAGSDDELLQLARQLYELLVPQAIGAKGDAQQIARKFLSPLADKDAVGGLGIAKAGNKPRWVRMREAGEPGWEEEKAKAEARKSTDRTADVLRALADFGLKPLMRVYTDSDMSSVQWKPLRKGQAVRTWDRDMFQQAIERMMSWESWNQRVGEAYAKLVEQKSRFEQKNFVGQEHLVQLVNQLQQDMKEASHGLESKEQTAHYLTGRALRGSDKVFEKWEKLDPDAPFDLYDTEIKNVQRRNTRRFGSHDLFAKLAEPKYQALWREDASFLTRYAVYNSIVRKLNHAKMFATFTLPDATAHPIWTRFDKLGGNLHQYTFLFNEFGEGRHAIRFQKLLTVEDGVAKEVDDVTVPISMSAQLDDLLPRDPHELVALYFQDYGAEQHLAGEFGGAKIQYRRDQLNHLHARRGARDVYLNLSVRVQSQSEARGERRPPYAAVFRLVGDNHRAFVHFDKLSDYLAEHPDDGKLGSEGLLSGLRVMSVDLGLRTSASISVFRVARKDELKPNSEGRVPFCFPIEGNENLVAVHERSQLLKLPGETESKDLRAIREERQRTLRQLRTQLAYLRLLVRCGSEDVGRRERSWAKLIEQPMDANQMTPDWREAFEDELQKLKSLYGICGDREWTEAVYESVRRVWRHMGKQVRDWRKDVRSGERPKIRGYQKDVVGGNSIEQIEYLERQYKFLKSWSFFGKVSGQVIRAEKGSRFAITLREHIDHAKEDRLKKLADRIIMEALGYVYALDDERGKGKWVAKYPPCQLILLEELSEYQFNNDRPPSENNQLMQWSHRGVFQELLNQAQVHDLLVGTMYAAFSSRFDARTGAPGIRCRRVPARCAREQNPEPFPWWLNKFVAEHKLDGCPLRADDLIPTGEGEFFVSPFSAEEGDFHQIHADLNAAQNLQRRLWSDFDISQIRLRCDWGEVDGEPVLIPRTTGKRTADSYGNKVFYTKTGVTYYERERGKKRRKVFAQEELSEEEAELLVEADEAREKSVVLMRDPSGIINRGDWTRQKEFWSMVNQRIEGYLVKQIRSRVRLQESACENTGDI

SEQ ID NO: 260 - protein, 1140 aa, Bacillus hisashii
MAPKKKRKVGIHGVPAAATRSFILKIEPNEEVKKGLWKTHEVLNHGIAYYMNILKLIRQEAIYEHHEQDPKNPKKVSKAEIQAELWDFVLKMQKCNSFTHEVDKDEVFNILRELYEELVPSSVEKKGEANQLSNKFLYPLVDPNSQSGKGTASSGRKPRWYNLKIAGDPSWEEEKKKWEEDKKKDPLAKILGKLAEYGLIPLFIPYTDSNEPIVKEIKWMEKSRNQSVRRLDKDMFIQALERFLSWESWNLKVKEEYEKVEKEYKTLEERIKEDIQALKALEQYEKERQEQLLRDTLNTNEYRLSKRGLRGWREIIQKWLKMDENEPSEKYLEVFKDYQRKHPREAGDYSVYEFLSKKENHFIWRNHPEYPYLYATFCEIDKKKKDAKQQATFTLADPINHPLWVRFEERSGSNLNKYRILTEQLHTEKLKKKLTVQLDRLIYPTESGGWEEKGKVDIVLLPSRQFYNQIFLDIEEKGKHAFTYKDESIKFPLKGTLGGARVQFDRDHLRRYPHKVESGNVGRIYFNMTVNIEPTESPVSKSLKIHRDDFPKVVNFKPKELTEWIKDSKGKKLKSGIESLEIGLRVMSIDLGQRQAAAASIFEVVDQKPDIEGKLFFPIKGTELYAVHRASFNIKLPGETLVKSREVLRKAREDNLKLMNQKLNFLRNVLHFQQFEDITEREKRVTKWISRQENSDVPLVYQDELIQIRELMYKPYKDWVAFLKQLHKRLEVEIGKEVKHWRKSLSDGRKGLYGISLKNIDEIDRTRKFLLRWSLRPTEPGEVRRLEPGQRFAIDQLNHLNALKEDRLKKMANTIIMHALGYCYDVRKKKWQAKNPACQIILFEDLSNYNPYEERSRFENSKLMKWSRREIPRQVALQGEIYGLQVGEVGAQFSSRFHAKTGSPGIRCSVVTKEKLQDNRFFKNLQREGRLTLDKIAVLKEGDLYPDKGGEKFISLSKDRKCVTTHADINAAQNLQKRFWTRTHGFYKVYCKAYQVDGQTVYIPESKDQKQKIIEEFGEGYFILKDGVYEWVNAGKLKIKKGSSKQSSSELVDSDILKDSFDLASELKGEKLMLYRDPSGNVFPSDKWMAAGVFFGKLERILISKLTNQYSISTIEDDSSKQSMKRPAATKKAGQAKKKK

SEQ ID NO: 261 - DNA, 47 bp, synthetic construct
  source 1..47: mol_type = other DNA
gggaaataagagagaaaagaagagtaagaagaaatataagagccacc

SEQ ID NO: 262 - DNA, 101 bp, synthetic construct
  source 1..101: mol_type = other DNA
gctggagcctcggtggccatgcttcttgccccttgggcctccccccagcccctcctccccttcctgcacccgtacccccgtggtctttgaataaagtctga

SEQ ID NO: 263 - DNA, 3420 bp, synthetic construct
  source 1..3420: mol_type = other DNA
atggccccaaagaagaagcggaaggtcggtatccacggagtcccagcagccgccaccagatccttcatcctgaagatcgagcccaacgaggaagtgaagaaaggcctctggaaaacccacgaggtgctgaaccacggaatcgcctactacatgaatatcctgaagctgatccggcaagaggccatctacgagcaccacgagcaggaccccaagaatcccaagaaggtgtccaaggccgagatccaggccgagctgtgggatttcgtgctgaagatgcagaagtgcaacagcttcacacacgaggtggacaaggacgaggtgttcaacatcctgagagagctgtacgaggaactggtgcccagcagcgtggaaaagaagggcgaagccaaccagctgagcaacaagtttctgtaccctctggtggaccccaacagccagtctggaaagggaacagccagcagcggcagaaagcccagatggtacaacctgaagattgccggcgatccctcctgggaagaagagaagaagaagtgggaagaagataagaaaaaggacccgctggccaagatcctgggcaagctggctgagtacggactgatccctctgttcatcccctacaccgacagcaacgagcccatcgtgaaagaaatcaagtggatggaaaagtcccggaaccagagcgtgcggcggctggataaggacatgttcattcaggccctggaacggttcctgagctgggagagctggaacctgaaagtgaaagaggaatacgagaaggtcgagaaagagtacaagaccctggaagagaggatcaaagaggacatccaggctctgaaggctctggaacagtatgagaaagagcggcaagaacagctgctgcgggacaccctgaacaccaacgagtaccggctgagcaagagaggccttagaggctggcgggaaatcatccagaaatggctgaaaatggacgagaacgagccctccgagaagtacctggaagtgttcaaggactaccagcggaagcaccctagagaggccggcgattacagcgtgtacgagttcctgtccaagaaagagaaccacttcatctggcggaatcaccctgagtacccctacctgtacgccaccttctgcgagatcgacaagaaaaagaaggacgccaagcagcaggccaccttcacactggccgatcctatcaatcaccctctgtgggtccgattcgaggaaagaagcggcagcaacctgaacaagtacagaatcctgaccgagcagctgcacaccgagaagctgaagaaaaagctgacagtgcagctggaccggctgatctaccctacagaatctggcggctgggaagagaagggcaaagtggacattgtgctgctgcccagccggcagttctacaaccagatcttcctggacatcgaggaaaagggcaagcacgccttcacctacaaggatgagagcatcaagttccctctgaagggcacactcggcggagccagagtgcagttcgacagagatcacctgagaagataccctcacaaggtggaaagcggcaacgtgggcagaatctacttcaacatgaccgtgaacatcgagcctacagagtccccagtgtccaagtctctgaagatccaccgggacgacttccccaaggtggtcaacttcaagcccaaagaactgaccgagtggatcaaggacagcaagggcaagaaactgaagtccggcatcgagtccctggaaatcggcctgagagtgatgagcatcgacctgggacagagacaggccgctgccgcctctattttcgaggtggtggatcagaagcccgacatcgaaggcaagctgtttttcccaatcaagggcaccgagctgtatgccgtgcacagagccagcttcaacatcaagctgcccggcgagacactggtcaagagcagagaagtgctgcggaaggccagagaggacaatctgaaactgatgaaccagaagctcaacttcctgcggaacgtgctgcacttccagcagttcgaggacatcaccgagagagagaagcgggtcaccaagtggatcagcagacaagagaacagcgacgtgcccctggtgtaccaggatgagctgatccagatccgcgagctgatgtacaagccttacaaggactgggtcgccttcctgaagcagctccacaagagactggaagtcgagatcggcaaagaagtgaagcactggcggaagtccctgagcgacggaagaaagggcctgtacggcatctccctgaagaacatcgacgagatcgatcggacccggaagttcctgctgagatggtccctgaggcctaccgaacctggcgaagtgcgtagactggaacccggccagagattcgccatcgaccagctgaatcacctgaacgccctgaaagaagatcggctgaagaagatggccaacaccatcatcatgcacgccctgggctactgctacgacgtgcggaagaagaaatggcaggctaagaaccccgcctgccagatcatcctgttcgaggatctgagcaactacaacccctacgaggaaaggtcccgcttcgagaacagcaagctcatgaagtggtccagacgcgagatccccagacaggttgcactgcagggcgagatctatggcctgcaagtgggagaagtgggcgctcagttcagcagcagattccacgccaagacaggcagccctggcatcagatgtagcgtcgtgaccaaagagaagctgcaggacaatcggttcttcaagaatctgcagagagagggcagactgaccctggacaaaatcgccgtgctgaaagagggcgatctgtacccagacaaaggcggcgagaagttcatcagcctgagcaaggatcggaagtgcgtgaccacacacgccgacatcaacgccgctcagaacctgcagaagcggttctggacaagaacccacggcttctacaaggtgtactgcaaggcctaccaggtggacggccagaccgtgtacatccctgagagcaaggaccagaagcagaagatcatcgaagagttcggcgagggctacttcattctgaaggacggggtgtacgaatgggtcaacgccggcaagctgaaaatcaagaagggcagctccaagcagagcagcagcgagctggtggatagcgacatcctgaaagacagcttcgacctggcctccgagctgaaaggcgaaaagctgatgctgtacagggaccccagcggcaatgtgttccccagcgacaaatggatggccgctggcgtgttcttcggaaagctggaacgcatcctgatcagcaagctgaccaaccagtactccatcagcaccatcgaggacgacagcagcaagcagtctatgaaaaggccggcggccacgaaaaaggccggccaggcaaaaaagaaaaag

SEQ ID NO: 264 - protein, 1112 aa, Bacillus sp.
MAIRSIKLKMKTNSGTDSIYLRKALWRTHQLINEGIAYYMNLLTLYRQEAIGDKTKEAYQAELINIIRNQQRNNGSSEEHGSDQEILALLRQLYELIIPSSIGESGDANQLGNKFLYPLVDPNSQSGKGTSNAGRKPRWKRLKEEGNPDWELEKKKDEERKAKDPTVKIFDNLNKYGLLPLFPLFTNIQKDIEWLPLGKRQSVRKWDKDMFIQAIERLLSWESWNRRVADEYKQLKEKTESYYKEHLTGGEEWIEKIRKFEKERNMELEKNAFAPNDGYFITSRQIRGWDRVYEKWSKLPESASPEELWKVVAEQQNKMSEGFGDPKVFSFLANRENRDIWRGHSERIYHIAAYNGLQKKLSRTKEQATFTLPDAIEHPLWIRYESPGGTNLNLFKLEEKQKKNYYVTLSKIIWPSEEKWIEKENIEIPLAPSIQFNRQIKLKQHVKGKQEISFSDYSSRISLDGVLGGSRIQFNRKYIKNHKELLGEGDIGPVFFNLVVDVAPLQETRNGRLQSPIGKALKVISSDFSKVIDYKPKELMDWMNTGSASNSFGVASLLEGMRVMSIDMGQRTSASVSIFEVVKELPKDQEQKLFYSINDTELFAIHKRSFLLNLPGEVVTKNNKQQRQERRKKRQFVRSQIRMLANVLRLETKKTPDERKKAIHKLMEIVQSYDSWTASQKEVWEKELNLLTNMAAFNDEIWKESLVELHHRIEPYVGQIVSKWRKGLSEGRKNLAGISMWNIDELEDTRRLLISWSKRSRTPGEANRIETDEPFGSSLLQHIQNVKDDRLKQMANLIIMTALGFKYDKEEKDRYKRWKETYPACQIILFENLNRYLFNLDRSRRENSRLMKWAHRSIPRTVSMQGEMFGLQVGDVRSEYSSRFHAKTGAPGIRCHALTEEDLKAGSNTLKRLIEDGFINESELAYLKKGDIIPSQGGELFVTLSKRYKKDSDNNELTVIHADINAAQNLQKRFWQQNSEVYRVPCQLARMGEDKLYIPKSQTETIKKYFGKGSFVKNNTEQEVYKWEKSEKMKIKTDTTFDLQDLDGFEDISKTIELAQEQQKKYLTMFRDPSGYFFNNETWRPQKEYWSIVNNIIKSCLKKKILSNKVEL

SEQ ID NO: 265 - protein, 1108 aa, Bacillus thermoamylovorans
MATRSFILKIEPNEEVKKGLWKTHEVLNHGIAYYMNILKLIRQEAIYEHHEQDPKNPKKVSKAEIQAELWDFVLKMQKCNSFTHEVDKDVVFNILRELYEELVPSSVEKKGEANQLSNKFLYPLVDPNSQSGKGTASSGRKPRWYNLKIAGDPSWEEEKKKWEEDKKKDPLAKILGKLAEYGLIPLFIPFTDSNEPIVKEIKWMEKSRNQSVRRLDKDMFIQALERFLSWESWNLKVKEEYEKVEKEHKTLEERIKEDIQAFKSLEQYEKERQEQLLRDTLNTNEYRLSKRGLRGWREIIQKWLKMDENEPSEKYLEVFKDYQRKHPREAGDYSVYEFLSKKENHFIWRNHPEYPYLYATFCEIDKKKKDAKQQATFTLADPINHPLWVRFEERSGSNLNKYRILTEQLHTEKLKKKLTVQLDRLIYPTESGGWEEKGKVDIVLLPSRQFYNQIFLDIEEKGKHAFTYKDESIKFPLKGTLGGARVQFDRDHLRRYPHKVESGNVGRIYFNMTVNIEPTESPVSKSLKIHRDDFPKFVNFKPKELTEWIKDSKGKKLKSGIESLEIGLRVMSIDLGQRQAAAASIFEVVDQKPDIEGKLFFPIKGTELYAVHRASFNIKLPGETLVKSREVLRKAREDNLKLMNQKLNFLRNVLHFQQFEDITEREKRVTKWISRQENSDVPLVYQDELIQIRELMYKPYKDWVAFLKQLHKRLEVEIGKEVKHWRKSLSDGRKGLYGISLKNIDEIDRTRKFLLRWSLRPTEPGEVRRLEPGQRFAIDQLNHLNALKEDRLKKMANTIIMHALGYCYDVRKKKWQAKNPACQIILFEDLSNYNPYEERSRFENSKLMKWSRREIPRQVALQGEIYGLQVGEVGAQFSSRFHAKTGSPGIRCSVVTKEKLQDNRFFKNLQREGRLTLDKIAVLKEGDLYPDKGGEKFISLSKDRKLVTTHADINAAQNLQKRFWTRTHGFYKVYCKAYQVDGQTVYIPESKDQKQKIIEEFGEGYFILKDGVYEWGNAGKLKIKKGSSKQSSSELVDSDILKDSFDLASELKGEKLMLYRDPSGNVFPSDKWMAAGVFFGKLERILISKLTNQYSISTIEDDSSKQSM

SEQ ID NO: 266 - protein, 1302 aa, unidentified
MQTKKTHLHLISAKASRKYRRTIACLSDTAKKDLERRKQSGAADPAQELSCLKTIKFKLEVPEGSKLPSFDRISQIYNALETIEKGSLSYLLFALILSGFRIFPNSSAAKTFASSSCYKNDQFASQIKEIFGEMVKNFIPSELESILKKGRRKNNKDWTEENIKRVLNSEFGRKNSEGSSALFDSFLSKFSQELFRKFDSWNEVNKKYLEAAELLDSMLASYGPFDSVCKMIGDSDSRNSLPDKSTIAFTNNAEITVDIESSVMPYMAIAALLREYRQSKSKAAPVAYVQSHLTTTNGNGLSWFFKFGLDLIRKAPVSSKQSTSDGSKSLQELFSVPDDKLDGLKFIKEACEALPEASLLCGEKGELLGYQDFRTSFAGHIDSWVANYVNRLFELIELVNQLPESIKLPSILTQKNHNLVASLGLQEAEVSHSLELFEGLVKNVRQTLKKLAGIDISSSPNEQDIKEFYAFSDVLNRLGSIRNQIENAVQTAKKDKIDLESAIEWKEWKKLKKLPKLNGLGGGVPKQQELLDKALESVKQIRHYQRIDFERVIQWAVNEHCLETVPKFLVDAEKKKINKESSTDFAAKENAVRFLLEGIGAAARGKTDSVSKAAYNWFVVNNFLAKKDLNRYFINCQGCIYKPPYSKRRSLAFALRSDNKDTIEVVWEKFETFYKEISKEIEKFNIFSQEFQTFLHLENLRMKLLLRRIQKPIPAEIAFFSLPQEYYDSLPPNVAFLALNQEITPSEYITQFNLYSSFLNGNLILLRRSRSYLRAKFSWVGNSKLIYAAKEARLWKIPNAYWKSDEWKMILDSNVLVFDKAGNVLPAPTLKKVCEREGDLRLFYPLLRQLPHDWCYRNPFVKSVGREKNVIEVNKEGEPKVASALPGSLFRLIGPAPFKSLLDDCFFNPLDKDLRECMLIVDQEISQKVEAQKVEASLESCTYSIAVPIRYHLEEPKVSNQFENVLAIDQGEAGLAYAVFSLKSIGEAETKPIAVGTIRIPSIRRLIHSVSTYRKKKQRLQNFKQNYDSTAFIMRENVTGDVCAKIVGLMKEFNAFPVLEYDVKNLESGSRQLSAVYKAVNSHFLYFKEPGRDALRKQLWYGGDSWTIDGIEIVTRERKEDGKEGVEKIVPLKVFPGRSVSARFTSKTCSCCGRNVFDWLFTEKKAKTNKKFNVNSKGELTTADGVIQLFEADRSKGPKFYARRKERTPLTKPIAKGSYSLEEIERRVRTNLRRAPKSKQSRDTSQSQYFCVYKDCALHFSGMQADENAAINIGRRFLTALRKNRRSDFPSNVKISDRLLDN

SEQ ID NO: 267 - protein, 1218 aa, unidentified
MTKHSIPLHAFRNSGADARKWKGRIALLAKRGKETMRTLQFPLEMSEPEAAAINTTPFAVAYNAIEGTGKGTLFDYWAKLHLAGFRFFPSGGAATIFRQQAVFEDASWNAAFCQQSGKDWPWLVPSKLYERFTKAPREVAKKDGSKKSIEFTQENVANESHVSLVGASITDKTPEDQKEFFLKMAGALAEKFDSWKSANEDRIVAMKVIDEFLKSEGLHLPSLENIAVKCSVETKPDNATVAWHDAPMSGVQNLAIGVFATCASRIDNIYDLNGGKLSKLIQESATTPNVTALSWLFGKGLEYFRTTDIDTIMQDFNIPASAKESIKPLVESAQAIPTMTVLGKKNYAPFRPNFGGKIDSWIANYASRLMLLNDILEQIEPGFELPQALLDNETLMSGIDMTGDELKELIEAVYAWVDAAKQGLATLLGRGGNVDDAVQTFEQFSAMMDTLNGTLNTISARYVRAVEMAGKDEARLEKLIECKFDIPKWCKSVPKLVGISGGLPKVEEEIKVMNAAFKDVRARMFVRFEEIAAYVASKGAGMDVYDALEKRELEQIKKLKSAVPERAHIQAYRAVLHRIGRAVQNCSEKTKQLFSSKVIEMGVFKNPSHLNNFIFNQKGAIYRSPFDRSRHAPYQLHADKLLKNDWLELLAEISATLMASESTEQMEDALRLERTRLQLQLSGLPDWEYPASLAKPDIEVEIQTALKMQLAKDTVTSDVLQRAFNLYSSVLSGLTFKLLRRSFSLKMRFSVADTTQLIYVPKVCDWAIPKQYLQAEGEIGIAARVVTESSPAKMVTEVEMKEPKALGHFMQQAPHDWYFDASLGGTQVAGRIVEKGKEVGKERKLVGYRMRGNSAYKTVLDKSLVGNTELSQCSMIIEIPYTQTVDADFRAQVQAGLPKVSINLPVKETITASNKDEQMLFDRFVAIDLGERGLGYAVFDAKTLELQESGHRPIKAITNLLNRTHHYEQRPNQRQKFQAKFNVNLSELRENTVGDVCHQINRICAYYNAFPVLEYMVPDRLDKQLKSVYESVTNRYIWSSTDAHKSARVQFWLGGETWEHPYLKSAKDKKPLVLSPGRGASGKGTSQTCSCCGRNPFDLIKDMKPRAKIAVVDGKAKLENSELKLFERNLESKDDMLARRHRNERAGMEQPLTPGNYTVDEIKALLRANLRRAPKNRRTKDTTVSEYHCVFSDCGKTMHADENAAVNIGGKFIADIEK

SEQ ID NO: 268 - protein, 1252 aa, Oleiphilus sp.
MTKLRHRQKKLTHDWAGSKKREVLGSNGKLQNPLLMPVKKGQVTEFRKAFSAYARATKGEMTDGRKNMFTHSFEPFKTKPSLHQCELADKAYQSLHSYLPGSLAHFLLSAHALGFRIFSKSGEATAFQASSKIEAYESKLASELACVDLSIQNLTISTLFNALTTSVRGKGEETSADPLIARFYTLLTGKPLSRDTQGPERDLAEVISRKIASSFGTWKEMTANPLQSLQFFEEELHALDANVSLSPAFDVLIKMNDLQGDLKNRTIVFDPDAPVFEYNAEDPADIIIKLTARYAKEAVIKNQNVGNYVKNAITTTNANGLGWLLNKGLSLLPVSTDDELLEFIGVERSHPSCHALIELIAQLEAPELFEKNVFSDTRSEVQGMIDSAVSNHIARLSSSRNSLSMDSEELERLIKSFQIHTPHCSLFIGAQSLSQQLESLPEALQSGVNSADILLGSTQYMLTNSLVEESIATYQRTLNRINYLSGVAGQINGAIKRKAIDGEKIHLPAAWSELISLPFIGQPVIDVESDLAHLKNQYQTLSNEFDTLISALQKNFDLNFNKALLNRTQHFEAMCRSTKKNALSKPEIVSYRDLLARLTSCLYRGSLVLRRAGIEVLKKHKIFESNSELREHVHERKHFVFVSPLDRKAKKLLRLTDSRPDLLHVIDEILQHDNLENKDRESLWLVRSGYLLAGLPDQLSSSFINLPIITQKGDRRLIDLIQYDQINRDAFVMLVTSAFKSNLSGLQYRANKQSFVVTRTLSPYLGSKLVYVPKDKDWLVPSQMFEGRFADILQSDYMVWKDAGRLCVIDTAKHLSNIKKSVFSSEEVLAFLRELPHRTFIQTEVRGLGVNVDGIAFNNGDIPSLKTFSNCVQVKVSRTNTSLVQTLNRWFEGGKVSPPSIQFERAYYKKDDQIHEDAAKRKIRFQMPATELVHASDDAGWTPSYLLGIDPGEYGMGLSLVSINNGEVLDSGFIHINSLINFASKKSNHQTKVVPRQQYKSPYANYLEQSKDSAAGDIAHILDRLIYKLNALPVFEALSGNSQSAADQVWTKVLSFYTWGDNDAQNSIRKQHWFGASHWDIKGMLRQPPTEKKPKPYIAFPGSQVSSYGNSQRCSCCGRNPIEQLREMAKDTSIKELKIRNSEIQLFDGTIKLFNPDPSTVIERRRHNLGPSRIPVADRTFKNISPSSLEFKELITIVSRSIRHSPEFIAKKRGIGSEYFCAYSDCNSSLNSEANAAANVAQKFQKQLFFEL

SEQ ID NO: 269 - protein, 767 aa, unidentified
MAQASSTPAVSPRPRPRYREERTLVRKLLPRPGQSKQEFRENVKKLRKAFLQFNADVSGVCQWAIQFRPRYGKPAEPTETFWKFFLEPETSLPPNDSRSPEFRRLQAFEAAAGINGAAALDDPAFTNELRDSILAVASRPKTKEAQRLFSRLKDYQPAHRMILAKVAAEWIESRYRRAHQNWERNYEEWKKEKQEWEQNHPELTPEIREAFNQIFQQLEVKEKRVRICPAARLLQNKDNCQYAGKNKHSVLCNQFNEFKKNHLQGKAIKFFYKDAEKYLRCGLQSLKPNVQGPFREDWNKYLRYMNLKEETLRGKNGGRLPHCKNLGQECEFNPHTALCKQYQQQLSSRPDLVQHDELYRKWRREYWREPRKPVFRYPSVKRHSIAKIFGENYFQADFKNSVVGLRLDSMPAGQYLEFAFAPWPRNYRPQPGETEISSVHLHFVGTRPRIGFRFRVPHKRSRFDCTQEELDELRSRTFPRKAQDQKFLEAARKRLLETFPGNAEQELRLLAVDLGTDSARAAFFIGKTFQQAFPLKIVKIEKLYEQWPNQKQAGDRRDASSKQPRPGLSRDHVGRHLQKMRAQASEIAQKRQELTGTPAPETTTDQAAKKATLQPFDLRGLTVHTARMIRDWARLNARQIIQLAEENQVDLIVLESLRGFRPPGYENLDQEKKRRVAFFAHGRIRRKVTEKAVERGMRVVTVPYLASSKVCAECRKKQKDNKQWEKNKKRGLFKCEGCGSQAQVDENAARVLGRVFWGEIELPTAIP

SEQ ID NO: 270 - protein, 870 aa, unidentified
MKVHEIPRSQLLKIKQYEGSFVEWYRDLQEDRKKFASLLFRWAAFGYAAREDDGATYISPSQALLERRLLLGDAEDVAIKFLDVLFKGGAPSSSCYSLFYEDFALRDKAKYSGAKREFIEGLATMPLDKIIERIRQDEQLSKIPAEEWLILGAEYSPEEIWEQVAPRIVNVDRSLGKQLRERLGIKCRRPHDAGYCKILMEVVARQLRSHNETYHEYLNQTHEMKTKVANNLTNEFDLVCEFAEVLEEKNYGLGWYVLWQGVKQALKEQKKPTKIQIAVDQLRQPKFAGLLTAKWRALKGAYDTWKLKKRLEKRKAFPYMPNWDNDYQIPVGLTGLGVFTLEVKRTEVVVDLKEHGKLFCSHSHYFGDLTAEKHPSRYHLKFRHKLKLRKRDSRVEPTIGPWIEAALREITIQKKPNGVFYLGLPYALSHGIDNFQIAKRFFSAAKPDKEVINGLPSEMVVGAADLNLSNIVAPVKARIGKGLEGPLHALDYGYGELIDGPKILTPDGPRCGELISLKRDIVEIKSAIKEFKACQREGLTMSEETTTWLSEVESPSDSPRCMIQSRIADTSRRLNSFKYQMNKEGYQDLAEALRLLDAMDSYNSLLESYQRMHLSPGEQSPKEAKFDTKRASFRDLLRRRVAHTIVEYFDDCDIVFFEDLDGPSDSDSRNNALVKLLSPRTLLLYIRQALEKRGIGMVEVAKDGTSQNNPISGHVGWRNKQNKSEIYFYEDKELLVMDADEVGAMNILCRGLNHSVCPYSFVTKAPEKKNDEKKEGDYGKRVKRFLKDRYGSSNVRFLVASMGFVTVTTKRPKDALVGKRLYYHGGELVTHDLHNRMKDEIKYLVEKEVLARRVSLSDSTIKSYKSFAHV

SEQ ID NO: 271 - protein, 1093 aa, unidentified
MSNKEKNASETRKAYTTKMIPRSHDRMKLLGNFMDYLMDGTPIFFELWNQFGGGIDRDIISGTANKDKISDDLLLAVNWFKVMPINSKPQGVSPSNLANLFQQYSGSEPDIQAQEYFASNFDTEKHQWKDMRVEYERLLAELQLSRSDMHHDLKLMYKEKCIGLSLSTAHYITSVMFGTGAKNNRQTKHQFYSKVIQLLEESTQINSVEQLASIILKAGDCDSYRKLRIRCSRKGATPSILKIVQDYELGTNHDDEVNVPSLIANLKEKLGRFEYECEWKCMEKIKAFLASKVGPYYLGSYSAMLENALSPIKGMTTKNCKFVLKQIDAKNDIKYENEPFGKIVEGFFDSPYFESDTNVKWVLHPHHIGESNIKTLWEDLNAIHSKYEEDIASLSEDKKEKRIKVYQGDVCQTINTYCEEVGKEAKTPLVQLLRYLYSRKDDIAVDKIIDGITFLSKKHKVEKQKINPVIQKYPSFNFGNNSKLLGKIISPKDKLKHNLKCNRNQVDNYIWIEIKVLNTKTMRWEKHHYALSSTRFLEEVYYPATSENPPDALAARFRTKTNGYEGKPALSAEQIEQIRSAPVGLRKVKKRQMRLEAARQQNLLPRYTWGKDFNINICKRGNNFEVTLATKVKKKKEKNYKVVLGYDANIVRKNTYAAIEAHANGDGVIDYNDLPVKPIESGFVTVESQVRDKSYDQLSYNGVKLLYCKPHVESRRSFLEKYRNGTMKDNRGNNIQIDFMKDFEAIADDETSLYYFNMKYCKLLQSSIRNHSSQAKEYREEIFELLRDGKLSVLKLSSLSNLSFVMFKVAKSLIGTYFGHLLKKPKNSKSDVKAPPITDEDKQKADPEMFALRLALEEKRLNKVKSKKEVIANKIVAKALELRDKYGPVLIKGENISDTTKKGKKSSTNSFLMDWLARGVANKVKEMVMMHQGLEFVEVNPNFTSHQDPFVHKNPENTFRARYSRCTPSELTEKNRKEILSFLSDKPSKRPTNAYYNEGAMAFLATYGLKKNDVLGVSLEKFKQIMANILHQRSEDQLLFPSRGGMFYLATYKLDADATSVNWNGKQFWVCNADLVAAYNVGLVDIQKDFKKK

SEQ ID NO: 272 - protein, 1054 aa, unidentified
MSSAIKSYKSVLRPNERKNQLLKSTIQCLEDGSAFFFKMLQGLFGGITPEIVRFSTEQEKQQQDIALWCAVNWFRPVSQDSLTHTIASDNLVEKFEEYYGGTASDAIKQYFSASIGESYYWNDCRQQYYDLCRELGVEVSDLTHDLEILCREKCLAVATESNQNNSIISVLFGTGEKEDRSVKLRITKKILEAISNLKEIPKNVAPIQEIILNVAKATKETFRQVYAGNLGAPSTLEKFIAKDGQKEFDLKKLQTDLKKVIRGKSKERDWCCQEELRSYVEQNTIQYDLWAWGEMFNKAHTALKIKSTRNYNFAKQRLEQFKEIQSLNNLLVVKKLNDFFDSEFFSGEETYTICVHHLGGKDLSKLYKAWEDDPADPENAIVVLCDDLKNNFKKEPIRNILRYIFTIRQECSAQDILAAAKYNQQLDRYKSQKANPSVLGNQGFTWTNAVILPEKAQRNDRPNSLDLRIWLYLKLRHPDGRWKKHHIPFYDTRFFQEIYAAGNSPVDTCQFRTPRFGYHLPKLTDQTAIRVNKKHVKAAKTEARIRLAIQQGTLPVSNLKITEISATINSKGQVRIPVKFDVGRQKGTLQIGDRFCGYDQNQTASHAYSLWEVVKEGQYHKELGCFVRFISSGDIVSITENRGNQFDQLSYEGLAYPQYADWRKKASKFVSLWQITKKNKKKEIVTVEAKEKFDAICKYQPRLYKFNKEYAYLLRDIVRGKSLVELQQIRQEIFRFIEQDCGVTRLGSLSLSTLETVKAVKGIIYSYFSTALNASKNNPISDEQRKEFDPELFALLEKLELIRTRKKKQKVERIANSLIQTCLENNIKFIRGEGDLSTTNNATKKKANSRSMDWLARGVFNKIRQLAPMHNITLFGCGSLYTSHQDPLVHRNPDKAMKCRWAAIPVKDIGDWVLRKLSQNLRAKNIGTGEYYHQGVKEFLSHYELQDLEEELLKWRSDRKSNIPCWVLQNRLAEKLGNKEAVVYIPVRGGRIYFATHKVATGAVSIVFDQKQVWVCNADHVAAANIALTVKGIGEQSSDEENPDGSRIKLQLTS

SEQ ID NO: 273 - protein, 6 aa, synthetic construct
GGSGGS

SEQ ID NO: 274 - DNA, 4092 bp, synthetic construct
  source 1..4092: mol_type = other DNA
gccaccatggccccaaagaagaagcggaaggtcggtatccacggagtcccagcagccgccaccagatccttcatcctgaagatcgagcccaacgaggaagtgaagaaaggcctctggaaaacccacgaggtgctgaaccacggaatcgcctactacatgaatatcctgaagctgatccggcaagaggccatctacgagcaccacgagcaggaccccaagaatcccaagaaggtgtccaaggccgagatccaggccgagctgtgggatttcgtgctgaagatgcagaagtgcaacagcttcacacacgaggtggacaaggacgaggtgttcaacatcctgagagagctgtacgaggaactggtgcccagcagcgtggaaaagaagggcgaagccaaccagctgagcaacaagtttctgtaccctctggtggaccccaacagccagtctggaaagggaacagccagcagcggcagaaagcccagatggtacaacctgaagattgccggcgatcccggaggctctggaggaagctccgaagtcgagttttcccatgagtactggatgagacacgcattgactctcgcaaagagggctcgagatgaacgcgaggtgcccgtgggggcagtactcgtgctcaacaatcgcgtaatcggcgaaggttggaatagggcaatcggactccacgaccccactgcacatgcggaaatcatggcccttcgacagggagggcttgtgatgcagaattatcgactttatgatgcgacgctgtacgtcacgtttgaaccttgcgtaatgtgcgcgggagctatgattcactcccgcattggacgagttgtattcggtgttcgcaacgccaagacgggtgccgcaggttcactgatggacgtgctgcatcatccaggcatgaaccaccgggtagaaatcacagaaggcatattggcggacgaatgtgcggcgctgttgtgtcgtttttttcgcatgcccaggcgggtctttaacgcccagaaaaaagcacaatcctctactgacggctcttctggatctgaaacacctggcacaagcgagagcgccacccctgagagctctggctcctgggaagaagagaagaagaagtgggaagaagataagaaaaaggacccgctggccaagatcctgggcaagctggctgagtacggactgatccctctgttcatcccctacaccgacagcaacgagcccatcgtgaaagaaatcaagtggatggaaaagtcccggaaccagagcgtgcggcggctggataaggacatgttcattcaggccctggaacggttcctgagctgggagagctggaacctgaaagtgaaagaggaatacgagaaggtcgagaaagagtacaagaccctggaagagaggatcaaagaggacatccaggctctgaaggctctggaacagtatgagaaagagcggcaagaacagctgctgcgggacaccctgaacaccaacgagtaccggctgagcaagagaggccttagaggctggcgggaaatcatccagaaatggctgaaaatggacgagaacgagccctccgagaagtacctggaagtgttcaaggactaccagcggaagcaccctagagaggccggcgattacagcgtgtacgagttcctgtccaagaaagagaaccacttcatctggcggaatcaccctgagtacccctacctgtacgccaccttctgcgagatcgacaagaaaaagaaggacgccaagcagcaggccaccttcacactggccgatcctatcaatcaccctctgtgggtccgattcgaggaaagaagcggcagcaacctgaacaagtacagaatcctgaccgagcagctgcacaccgagaagctgaagaaaaagctgacagtgcagctggaccggctgatctaccctacagaatctggcggctgggaagagaagggcaaagtggacattgtgctgctgcccagccggcagttctacaaccagatcttcctggacatcgaggaaaagggcaagcacgccttcacctacaaggatgagagcatcaagttccctctgaagggcacactcggcggagccagagtgcagttcgacagagatcacctgagaagataccctcacaaggtggaaagcggcaacgtgggcagaatctacttcaacatgaccgtgaacatcgagcctacagagtccccagtgtccaagtctctgaagatccaccgggacgacttccccaaggtggtcaacttcaagcccaaagaactgaccgagtggatcaaggacagcaagggcaagaaactgaagtccggcatcgagtccctggaaatcggcctgagagtgatgagcatcgacctgggacagagacaggccgctgccgcctctattttcgaggtggtggatcagaagcccgacatcgaaggcaagctgtttttcccaatcaagggcaccgagctgtatgccgtgcacagagccagcttcaacatcaagctgcccggcgagacactggtcaagagcagagaagtgctgcggaaggccagagaggacaatctgaaactgatgaaccagaagctcaacttcctgcggaacgtgctgcacttccagcagttcgaggacatcaccgagagagagaagcgggtcaccaagtggatcagcagacaagagaacagcgacgtgcccctggtgtaccaggatgagctgatccagatccgcgagctgatgtacaagccttacaaggactgggtcgccttcctgaagcagctccacaagagactggaagtcgagatcggcaaagaagtgaagcactggcggaagtccctgagcgacggaagaaagggcctgtacggcatctccctgaagaacatcgacgagatcgatcggacccggaagttcctgctgagatggtccctgaggcctaccgaacctggcgaagtgcgtagactggaacccggccagagattcgccatcgaccagctgaatcacctgaacgccctgaaagaagatcggctgaagaagatggccaacaccatcatcatgcacgccctgggctactgctacgacgtgcggaagaagaaatggcaggctaagaaccccgcctgccagatcatcctgttcgaggatctgagcaactacaacccctacgaggaaaggtcccgcttcgagaacagcaagctcatgaagtggtccagacgcgagatccccagacaggttgcactgcagggcgagatctatggcctgcaagtgggagaagtgggcgctcagttcagcagcagattccacgccaagacaggcagccctggcatcagatgtagcgtcgtgaccaaagagaagctgcaggacaatcggttcttcaagaatctgcagagagagggcagactgaccctggacaaaatcgccgtgctgaaagagggcgatctgtacccagacaaaggcggcgagaagttcatcagcctgagcaaggatcggaagtgcgtgaccacacacgccgacatcaacgccgctcagaacctgcagaagcggttctggacaagaacccacggcttctacaaggtgtactgcaaggcctaccaggtggacggccagaccgtgtacatccctgagagcaaggaccagaagcagaagatcatcgaagagttcggcgagggctacttcattctgaaggacggggtgtacgaatgggtcaacgccggcaagctgaaaatcaagaagggcagctccaagcagagcagcagcgagctggtggatagcgacatcctgaaagacagcttcgacctggcctccgagctgaaaggcgaaaagctgatgctgtacagggaccccagcggcaatgtgttccccagcgacaaatggatggccgctggcgtgttcttcggaaagctggaacgcatcctgatcagcaagctgaccaaccagtactccatcagcaccatcgaggacgacagcagcaagcagtctatgaaaaggccggcggccacgaaaaaggccggccaggcaaaaaagaaaaagggatcctacccatacgatgttccagattacgcttatccctacgacgtgcctgattatgcatacccatatgatgtccccgactatgcctaa

SEQ ID NO: 275 - protein, 1361 aa, synthetic construct
MAPKKKRKVGIHGVPAAATRSFILKIEPNEEVKKGLWKTHEVLNHGIAYYMNILKLIRQEAIYEHHEQDPKNPKKVSKAEIQAELWDFVLKMQKCNSFTHEVDKDEVFNILRELYEELVPSSVEKKGEANQLSNKFLYPLVDPNSQSGKGTASSGRKPRWYNLKIAGDPGGSGGSSEVEFSHEYWMRHALTLAKRARDEREVPVGAVLVLNNRVIGEGWNRAIGLHDPTAHAEIMALRQGGLVMQNYRLYDATLYVTFEPCVMCAGAMIHSRIGRVVFGVRNAKTGAAGSLMDVLHHPGMNHRVEITEGILADECAALLCRFFRMPRRVFNAQKKAQSSTDGSSGSETPGTSESATPESSGSWEEEKKKWEEDKKKDPLAKILGKLAEYGLIPLFIPYTDSNEPIVKEIKWMEKSRNQSVRRLDKDMFIQALERFLSWESWNLKVKEEYEKVEKEYKTLEERIKEDIQALKALEQYEKERQEQLLRDTLNTNEYRLSKRGLRGWREIIQKWLKMDENEPSEKYLEVFKDYQRKHPREAGDYSVYEFLSKKENHFIWRNHPEYPYLYATFCEIDKKKKDAKQQATFTLADPINHPLWVRFEERSGSNLNKYRILTEQLHTEKLKKKLTVQLDRLIYPTESGGWEEKGKVDIVLLPSRQFYNQIFLDIEEKGKHAFTYKDESIKFPLKGTLGGARVQFDRDHLRRYPHKVESGNVGRIYFNMTVNIEPTESPVSKSLKIHRDDFPKVVNFKPKELTEWIKDSKGKKLKSGIESLEIGLRVMSIDLGQRQAAAASIFEVVDQKPDIEGKLFFPIKGTELYAVHRASFNIKLPGETLVKSREVLRKAREDNLKLMNQKLNFLRNVLHFQQFEDITEREKRVTKWISRQENSDVPLVYQDELIQIRELMYKPYKDWVAFLKQLHKRLEVEIGKEVKHWRKSLSDGRKGLYGISLKNIDEIDRTRKFLLRWSLRPTEPGEVRRLEPGQRFAIDQLNHLNALKEDRLKKMANTIIMHALGYCYDVRKKKWQAKNPACQIILFEDLSNYNPYEERSRFENSKLMKWSRREIPRQVALQGEIYGLQVGEVGAQFSSRFHAKTGSPGIRCSVVTKEKLQDNRFFKNLQREGRLTLDKIAVLKEGDLYPDKGGEKFISLSKDRKCVTTHADINAAQNLQKRFWTRTHGFYKVYCKAYQVDGQTVYIPESKDQKQKIIEEFGEGYFILKDGVYEWVNAGKLKIKKGSSKQSSSELVDSDILKDSFDLASELKGEKLMLYRDPSGNVFPSDKWMAAGVFFGKLERILISKLTNQYSISTIEDDSSKQSMKRPAATKKAGQAKKKKGSYPYDVPDYAYPYDVPDYAYPYDVPDYA

SEQ ID NO: 276 - DNA, 4092 bp, synthetic construct
  source 1..4092: mol_type = other DNA
gccaccatggccccaaagaagaagcggaaggtcggtatccacggagtcccagcagccgccaccagatccttcatcctgaagatcgagcccaacgaggaagtgaagaaaggcctctggaaaacccacgaggtgctgaaccacggaatcgcctactacatgaatatcctgaagctgatccggcaagaggccatctacgagcaccacgagcaggaccccaagaatcccaagaaggtgtccaaggccgagatccaggccgagctgtgggatttcgtgctgaagatgcagaagtgcaacagcttcacacacgaggtggacaaggacgaggtgttcaacatcctgagagagctgtacgaggaactggtgcccagcagcgtggaaaagaagggcgaagccaaccagctgagcaacaagtttctgtaccctctggtggaccccaacagccagtctggaaagggaacagccagcagcggcagaaagcccagatggtacaacctgaagattgccggcgatccctcctgggaagaagagaagaagaagtgggaagaagataagaaaaaggacccgctggccaagatcctgggcaagctggctgagtacggactgatccctctgttcatcccctacaccgacagcaacgagcccatcgtgaaagaaatcaagtggatggaaaagtcccggaaccagagcgtgcggcggctggataaggacatgttcattcaggccctggaacggttcctgagctgggagagctggaacctgaaagtgaaagaggaatacgagaaggtcgagaaagagtacaagaccctggaagagaggatcaaaggaggctctggaggaagctccgaagtcgagttttcccatgagtactggatgagacacgcattgactctcgcaaagagggctcgagatgaacgcgaggtgcccgtgggggcagtactcgtgctcaacaatcgcgtaatcggcgaaggttggaatagggcaatcggactccacgaccccactgcacatgcggaaatcatggcccttcgacagggagggcttgtgatgcagaattatcgactttatgatgcgacgctgtacgtcacgtttgaaccttgcgtaatgtgcgcgggagctatgattcactcccgcattggacgagttgtattcggtgttcgcaacgccaagacgggtgccgcaggttcactgatggacgtgctgcatcatccaggcatgaaccaccgggtagaaatcacagaaggcatattggcggacgaatgtgcggcgctgttgtgtcgtttttttcgcatgcccaggcgggtctttaacgcccagaaaaaagcacaatcctctactgacggctcttctggatctgaaacacctggcacaagcgagagcgccacccctgagagctctggcgaggacatccaggctctgaaggctctggaacagtatgagaaagagcggcaagaacagctgctgcgggacaccctgaacaccaacgagtaccggctgagcaagagaggccttagaggctggcgggaaatcatccagaaatggctgaaaatggacgagaacgagccctccgagaagtacctggaagtgttcaaggactaccagcggaagcaccctagagaggccggcgattacagcgtgtacgagttcctgtccaagaaagagaaccacttcatctggcggaatcaccctgagtacccctacctgtacgccaccttctgcgagatcgacaagaaaaagaaggacgccaagcagcaggccaccttcacactggccgatcctatcaatcaccctctgtgggtccgattcgaggaaagaagcggcagcaacctgaacaagtacagaatcctgaccgagcagctgcacaccgagaagctgaagaaaaagctgacagtgcagctggaccggctgatctaccctacagaatctggcggctgggaagagaagggcaaagtggacattgtgctgctgcccagccggcagttctacaaccagatcttcctggacatcgaggaaaagggcaagcacgccttcacctacaaggatgagagcatcaagttccctctgaagggcacactcggcggagccagagtgcagttcgacagagatcacctgagaagataccctcacaaggtggaaagcggcaacgtgggcagaatctacttcaacatgaccgtgaacatcgagcctacagagtccccagtgtccaagtctctgaagatccaccgggacgacttccccaaggtggtcaacttcaagcccaaagaactgaccgagtggatcaaggacagcaagggcaagaaactgaagtccggcatcgagtccctggaaatcggcctgagagtgatgagcatcgacctgggacagagacaggccgctgccgcctctattttcgaggtggtggatcagaagcccgacatcgaaggcaagctgtttttcccaatcaagggcaccgagctgtatgccgtgcacagagccagcttcaacatcaagctgcccggcgagacactggtcaagagcagagaagtgctgcggaaggccagagaggacaatctgaaactgatgaaccagaagctcaacttcctgcggaacgtgctgcacttccagcagttcgaggacatcaccgagagagagaagcgggtcaccaagtggatcagcagacaagagaacagcgacgtgcccctggtgtaccaggatgagctgatccagatccgcgagctgatgtacaagccttacaaggactgggtcgccttcctgaagcagctccacaagagactggaagtcgagatcggcaaagaagtgaagcactggcggaagtccctgagcgacggaagaaagggcctgtacggcatctccctgaagaacatcgacgagatcgatcggacccggaagttcctgctgagatggtccctgaggcctaccgaacctggcgaagtgcgtagactggaacccggccagagattcgccatcgaccagctgaatcacctgaacgccctgaaagaagatcggctgaagaagatggccaacaccatcatcatgcacgccctgggctactgctacgacgtgcggaagaagaaatggcaggctaagaaccccgcctgccagatcatcctgttcgaggatctgagcaactacaacccctacgaggaaaggtcccgcttcgagaacagcaagctcatgaagtggtccagacgcgagatccccagacaggttgcactgcagggcgagatctatggcctgcaagtgggagaagtgggcgctcagttcagcagcagattccacgccaagacaggcagccctggcatcagatgtagcgtcgtgaccaaagagaagctgcaggacaatcggttcttcaagaatctgcagagagagggcagactgaccctggacaaaatcgccgtgctgaaagagggcgatctgtacccagacaaaggcggcgagaagttcatcagcctgagcaaggatcggaagtgcgtgaccacacacgccgacatcaacgccgctcagaacctgcagaagcggttctggacaagaacccacggcttctacaaggtgtactgcaaggcctaccaggtggacggccagaccgtgtacatccctgagagcaaggaccagaagcagaagatcatcgaagagttcggcgagggctacttcattctgaaggacggggtgtacgaatgggtcaacgccggcaagctgaaaatcaagaagggcagctccaagcagagcagcagcgagctggtggatagcgacatcctgaaagacagcttcgacctggcctccgagctgaaaggcgaaaagctgatgctgtacagggaccccagcggcaatgtgttccccagcgacaaatggatggccgctggcgtgttcttcggaaagctggaacgcatcctgatcagcaagctgaccaaccagtactccatcagcaccatcgaggacgacagcagcaagcagtctatgaaaaggccggcggccacgaaaaaggccggccaggcaaaaaagaaaaagggatcctacccatacgatgttccagattacgcttatccctacgacgtgcctgattatgcatacccatatgatgtccccgactatgcctaa

SEQ ID NO: 277 - protein, 1361 aa, synthetic construct
MAPKKKRKVGIHGVPAAATRSFILKIEPNEEVKKGLWKTHEVLNHGIAYYMNILKLIRQEAIYEHHEQDPKNPKKVSKAEIQAELWDFVLKMQKCNSFTHEVDKDEVFNILRELYEELVPSSVEKKGEANQLSNKFLYPLVDPNSQSGKGTASSGRKPRWYNLKIAGDPSWEEEKKKWEEDKKKDPLAKILGKLAEYGLIPLFIPYTDSNEPIVKEIKWMEKSRNQSVRRLDKDMFIQALERFLSWESWNLKVKEEYEKVEKEYKTLEERIKGGSGGSSEVEFSHEYWMRHALTLAKRARDEREVPVGAVLVLNNRVIGEGWNRAIGLHDPTAHAEIMALRQGGLVMQNYRLYDATLYVTFEPCVMCAGAMIHSRIGRVVFGVRNAKTGAAGSLMDVLHHPGMNHRVEITEGILADECAALLCRFFRMPRRVFNAQKKAQSSTDGSSGSETPGTSESATPESSGEDIQALKALEQYEKERQEQLLRDTLNTNEYRLSKRGLRGWREIIQKWLKMDENEPSEKYLEVFKDYQRKHPREAGDYSVYEFLSKKENHFIWRNHPEYPYLYATFCEIDKKKKDAKQQATFTLADPINHPLWVRFEERSGSNLNKYRILTEQLHTEKLKKKLTVQLDRLIYPTESGGWEEKGKVDIVLLPSRQFYNQIFLDIEEKGKHAFTYKDESIKFPLKGTLGGARVQFDRDHLRRYPHKVESGNVGRIYFNMTVNIEPTESPVSKSLKIHRDDFPKVVNFKPKELTEWIKDSKGKKLKSGIESLEIGLRVMSIDLGQRQAAAASIFEVVDQKPDIEGKLFFPIKGTELYAVHRASFNIKLPGETLVKSREVLRKAREDNLKLMNQKLNFLRNVLHFQQFEDITEREKRVTKWISRQENSDVPLVYQDELIQIRELMYKPYKDWVAFLKQLHKRLEVEIGKEVKHWRKSLSDGRKGLYGISLKNIDEIDRTRKFLLRWSLRPTEPGEVRRLEPGQRFAIDQLNHLNALKEDRLKKMANTIIMHALGYCYDVRKKKWQAKNPACQIILFEDLSNYNPYEERSRFENSKLMKWSRREIPRQVALQGEIYGLQVGEVGAQFSSRFHAKTGSPGIRCSVVTKEKLQDNRFFKNLQREGRLTLDKIAVLKEGDLYPDKGGEKFISLSKDRKCVTTHADINAAQNLQKRFWTRTHGFYKVYCKAYQVDGQTVYIPESKDQKQKIIEEFGEGYFILKDGVYEWVNAGKLKIKKGSSKQSSSELVDSDILKDSFDLASELKGEKLMLYRDPSGNVFPSDKWMAAGVFFGKLERILISKLTNQYSISTIEDDSSKQSMKRPAATKKAGQAKKKKGSYPYDVPDYAYPYDVPDYAYPYDVPDYA

SEQ ID NO: 278 - DNA, 4092 bp, synthetic construct
  source 1..4092: mol_type = other DNA
gccaccatggccccaaagaagaagcggaaggtcggtatccacggagtcccagcagccgccaccagatccttcatcctgaagatcgagcccaacgaggaagtgaagaaaggcctctggaaaacccacgaggtgctgaaccacggaatcgcctactacatgaatatcctgaagctgatccggcaagaggccatctacgagcaccacgagcaggaccccaagaatcccaagaaggtgtccaaggccgagatccaggccgagctgtgggatttcgtgctgaagatgcagaagtgcaacagcttcacacacgaggtggacaaggacgaggtgttcaacatcctgagagagctgtacgaggaactggtgcccagcagcgtggaaaagaagggcgaagccaaccagctgagcaacaagtttctgtaccctctggtggaccccaacagccagtctggaaagggaacagccagcagcggcagaaagcccagatggtacaacctgaagattgccggcgatccctcctgggaagaagagaagaagaagtgggaagaagataagaaaaaggacccgctggccaagatcctgggcaagctggctgagtacggactgatccctctgttcatcccctacaccgacagcaacgagcccatcgtgaaagaaatcaagtggatggaaaagtcccggaaccagagcgtgcggcggctggataaggacatgttcattcaggccctggaacggttcctgagctgggagagctggaacctgaaagtgaaagaggaatacgagaaggtcgagaaagagtacaagaccctggaagagaggatcaaagaggacatccaggctctgaaggctctggaacagtatgagaaagagcggcaagaacagctgctgcgggacaccctgaacaccaacgagtaccggctgagcaagagaggccttagaggctggcgggaaatcatccagaaatggctgaaaatggacggaggctctggaggaagctccgaagtcgagttttcccatgagtactggatgagacacgcattgactctcgcaaagagggctcgagatgaacgcgaggtgcccgtgggggcagtactcgtgctcaacaatcgcgtaatcggcgaaggttggaatagggcaatcggactccacgaccccactgcacatgcggaaatcatggcccttcgacagggagggcttgtgatgcagaattatcgactttatgatgcgacgctgtacgtcacgtttgaaccttgcgtaatgtgcgcgggagctatgattcactcccgcattggacgagttgtattcggtgttcgcaacgccaagacgggtgccgcaggttcactgatggacgtgctgcatcatccaggcatgaaccaccgggtagaaatcacagaaggcatattggcggacgaatgtgcggcgctgttgtgtcgtttttttcgcatgcccaggcgggtctttaacgcccagaaaaaagcacaatcctctactgacggctcttctggatctgaaacacctggcacaagcgagagcgccacccctgagagctctggcgagaacgagccctccgagaagtacctggaagtgttcaaggactaccagcggaagcaccctagagaggccggcgattacagcgtgtacgagttcctgtccaagaaagagaaccacttcatctggcggaatcaccctgagtacccctacctgtacgccaccttctgcgagatcgacaagaaaaagaaggacgccaagcagcaggccaccttcacactggccgatcctatcaatcaccctctgtgggtccgattcgaggaaagaagcggcagcaacctgaacaagtacagaatcctgaccgagcagctgcacaccgagaagctgaagaaaaagctgacagtgcagctggaccggctgatctaccctacagaatctggcggctgggaagagaagggcaaagtggacattgtgctgctgcccagccggcagttctacaaccagatcttcctggacatcgaggaaaagggcaagcacgccttcacctacaaggatgagagcatcaagttccctctgaagggcacactcggcggagccagagtgcagttcgacagagatcacctgagaagataccctcacaaggtggaaagcggcaacgtgggcagaatctacttcaacatgaccgtgaacatcgagcctacagagtccccagtgtccaagtctctgaagatccaccgggacgacttccccaaggtggtcaacttcaagcccaaagaactgaccgagtggatcaaggacagcaagggcaagaaactgaagtccggcatcgagtccctggaaatcggcctgagagtgatgagcatcgacctgggacagagacaggccgctgccgcctctattttcgaggtggtggatcagaagcccgacatcgaaggcaagctgtttttcccaatcaagggcaccgagctgtatgccgtgcacagagccagcttcaacatcaagctgcccggcgagacactggtcaagagcagagaagtgctgcggaaggccagagaggacaatctgaaactgatgaaccagaagctcaacttcctgcggaacgtgctgcacttccagcagttcgaggacatcaccgagagagagaagcgggtcaccaagtggatcagcagacaagagaacagcgacgtgcccctggtgtaccaggatgagctgatccagatccgcgagctgatgtacaagccttacaaggactgggtcgccttcctgaagcagctccacaagagactggaagtcgagatcggcaaagaagtgaagcactggcggaagtccctgagcgacggaagaaagggcctgtacggcatctccctgaagaacatcgacgagatcgatcggacccggaagttcctgctgagatggtccctgaggcctaccgaacctggcgaagtgcgtagactggaacccggccagagattcgccatcgaccagctgaatcacctgaacgccctgaaagaagatcggctgaagaagatggccaacaccatcatcatgcacgccctgggctactgctacgacgtgcggaagaagaaatggcaggctaagaaccccgcctgccagatcatcctgttcgaggatctgagcaactacaacccctacgaggaaaggtcccgcttcgagaacagcaagctcatgaagtggtccagacgcgagatccccagacaggttgcactgcagggcgagatctatggcctgcaagtgggagaagtgggcgctcagttcagcagcagattccacgccaagacaggcagccctggcatcagatgtagcgtcgtgaccaaagagaagctgcaggacaatcggttcttcaagaatctgcagagagagggcagactgaccctggacaaaatcgccgtgctgaaagagggcgatctgtacccagacaaaggcggcgagaagttcatcagcctgagcaaggatcggaagtgcgtgaccacacacgccgacatcaacgccgctcagaacctgcagaagcggttctggacaagaacccacggcttctacaaggtgtactgcaaggcctaccaggtggacggccagaccgtgtacatccctgagagcaaggaccagaagcagaagatcatcgaagagttcggcgagggctacttcattctgaaggacggggtgtacgaatgggtcaacgccggcaagctgaaaatcaagaagggcagctccaagcagagcagcagcgagctggtggatagcgacatcctgaaagacagcttcgacctggcctccgagctgaaaggcgaaaagctgatgctgtacagggaccccagcggcaatgtgttccccagcgacaaatggatggccgctggcgtgttcttcggaaagctggaacgcatcctgatcagcaagctgaccaaccagtactccatcagcaccatcgaggacgacagcagcaagcagtctatgaaaaggccggcggccacgaaaaaggccggccaggcaaaaaagaaaaagggatcctacccatacgatgttccagattacgcttatccctacgacgtgcctgattatgcatacccatatgatgtccccgactatgcctaa

SEQ ID NO: 279 - protein, 1361 aa, synthetic construct
MAPKKKRKVGIHGVPAAATRSFILKIEPNEEVKKGLWKTHEVLNHGIAYYMNILKLIRQEAIYEHHEQDPKNPKKVSKAEIQAELWDFVLKMQKCNSFTHEVDKDEVFNILRELYEELVPSSVEKKGEANQLSNKFLYPLVDPNSQSGKGTASSGRKPRWYNLKIAGDPSWEEEKKKWEEDKKKDPLAKILGKLAEYGLIPLFIPYTDSNEPIVKEIKWMEKSRNQSVRRLDKDMFIQALERFLSWESWNLKVKEEYEKVEKEYKTLEERIKEDIQALKALEQYEKERQEQLLRDTLNTNEYRLSKRGLRGWREIIQKWLKMDGGSGGSSEVEFSHEYWMRHALTLAKRARDEREVPVGAVLVLNNRVIGEGWNRAIGLHDPTAHAEIMALRQGGLVMQNYRLYDATLYVTFEPCVMCAGAMIHSRIGRVVFGVRNAKTGAAGSLMDVLHHPGMNHRVEITEGILADECAALLCRFFRMPRRVFNAQKKAQSSTDGSSGSETPGTSESATPESSGENEPSEKYLEVFKDYQRKHPREAGDYSVYEFLSKKENHFIWRNHPEYPYLYATFCEIDKKKKDAKQQATFTLADPINHPLWVRFEERSGSNLNKYRILTEQLHTEKLKKKLTVQLDRLIYPTESGGWEEKGKVDIVLLPSRQFYNQIFLDIEEKGKHAFTYKDESIKFPLKGTLGGARVQFDRDHLRRYPHKVESGNVGRIYFNMTVNIEPTESPVSKSLKIHRDDFPKVVNFKPKELTEWIKDSKGKKLKSGIESLEIGLRVMSIDLGQRQAAAASIFEVVDQKPDIEGKLFFPIKGTELYAVHRASFNIKLPGETLVKSREVLRKAREDNLKLMNQKLNFLRNVLHFQQFEDITEREKRVTKWISRQENSDVPLVYQDELIQIRELMYKPYKDWVAFLKQLHKRLEVEIGKEVKHWRKSLSDGRKGLYGISLKNIDEIDRTRKFLLRWSLRPTEPGEVRRLEPGQRFAIDQLNHLNALKEDRLKKMANTIIMHALGYCYDVRKKKWQAKNPACQIILFEDLSNYNPYEERSRFENSKLMKWSRREIPRQVALQGEIYGLQVGEVGAQFSSRFHAKTGSPGIRCSVVTKEKLQDNRFFKNLQREGRLTLDKIAVLKEGDLYPDKGGEKFISLSKDRKCVTTHADINAAQNLQKRFWTRTHGFYKVYCKAYQVDGQTVYIPESKDQKQKIIEEFGEGYFILKDGVYEWVNAGKLKIKKGSSKQSSSELVDSDILKDSFDLASELKGEKLMLYRDPSGNVFPSDKWMAAGVFFGKLERILISKLTNQYSISTIEDDSSKQSMKRPAATKKAGQAKKKKGSYPYDVPDYAYPYDVPDYAYPYDVPDYA

SEQ ID NO: 280 - DNA, 4092 bp, synthetic construct
  source 1..4092: mol_type = other DNA
gccaccatggccccaaagaagaagcggaaggtcggtatccacggagtcccagcagccgccaccagatccttcatcctgaagatcgagcccaacgaggaagtgaagaaaggcctctggaaaacccacgaggtgctgaaccacggaatcgcctactacatgaatatcctgaagctgatccggcaagaggccatctacgagcaccacgagcaggaccccaagaatcccaagaaggtgtccaaggccgagatccaggccgagctgtgggatttcgtgctgaagatgcagaagtgcaacagcttcacacacgaggtggacaaggacgaggtgttcaacatcctgagagagctgtacgaggaactggtgcccagcagcgtggaaaagaagggcgaagccaaccagctgagcaacaagtttctgtaccctctggtggaccccaacagccagtctggaaagggaacagccagcagcggcagaaagcccagatggtacaacctgaagattgccggcgatccctcctgggaagaagagaagaagaagtgggaagaagataagaaaaaggacccgctggccaagatcctgggcaagctggctgagtacggactgatccctctgttcatcccctacaccgacagcaacgagcccatcgtgaaagaaatcaagtggatggaaaagtcccggaaccagagcgtgcggcggctggataaggacatgttcattcaggccctggaacggttcctgagctgggagagctggaacctgaaagtgaaagaggaatacgagaaggtcgagaaagagtacaagaccctggaagagaggatcaaagaggacatccaggctctgaaggctctggaacagtatgagaaagagcggcaagaacagctgctgcgggacaccctgaacaccaacgagtaccggctgagcaagagaggccttagaggctggcgggaaatcatccagaaatggctgaaaatggacgagaacgagccctccgagaagtacctggaagtgttcaaggactaccagcggaagcaccctagagaggccggcgattacagcgtgtacgagttcctgtccaagaaagagaaccacttcatctggcggaatcaccctgagtacccctacctgtacgccaccttctgcgagatcgacaagaaaaagaaggacgccaagcagcaggccaccttcacactggccgatcctatcaatcaccctctgtgggtccgattcgaggaaagaagcggcagcaacctgaacaagtacagaatcctgaccgagcagctgcacaccgagaagctgaagaaaaagctgacagtgcagctggaccggctgatctaccctacagaatctggcggctgggaagagaagggcaaagtggacattgtgctgctgcccagccggcagttctacaaccagatcttcctggacatcgaggaaaagggcaagcacgccttcacctacaaggatgagagcatcaagttccctctgaagggcacactcggcggagccagagtgcagttcgacagagatcacctgagaagataccctcacaaggtggaaagcggcaacgtgggcagaatctacttcaacatgaccgtgaacatcgagcctacagagtccccagtgtccaagtctctgaagatccaccgggacgacttccccaaggtggtcaacttcaagcccaaagaactgaccgagtggatcaaggacagcaagggcaagaaactgaagtccggcatcgagtccctggaaatcggcctgagagtgatgagcatcgacctgggacagagacaggccgctgccgcctctattttcgaggtggtggatcagaagcccgacatcgaaggcaagctgtttttcccaatcaagggcaccgagctgtatgccgtgcacagagccagcttcaacatcaagctgcccggcgagacactggtcaagagcagagaagtgctgcggaaggccagagaggacaatctgaaactgatgaaccagaagctcaacttcctgcggaacgtgctgcacttccagcagttcgaggacatcaccgagagagagaagcgggtcaccaagtggatcagcagacaagagaacagcgacgtgcccctggtgtaccaggatgagctgatccagatccgcgagctgatgtacaagccttacaaggactgggtcgccttcctgaagcagctccacaagagactggaagtcgagatcggcaaagaagtgaagcactggcggaagtccctgagcgacggaagaaagggcctgtacggcatctccctgaagaacatcgacgagatcgatcggacccggaagttcctgctgagatggtccctgaggcctaccgaacctggcgaagtgcgtagactggaacccggccagagattcgccatcgaccagctgaatcacctgaacgccctgaaagaagatcggctgaagaagatggccaacaccatcatcatgcacgccctgggctactgctacgacgtgcggaagaagaaatggcaggctaagaaccccgcctgccagatcatcctgttcgaggatctgagcaactacaacccctacgaggaaaggtcccgcttcgagaacagcaagctcatgaagtggtccagacgcgagatccccagacaggttgcactgcagggcgagatctatggcctgcaagtgggagaagtgggcgctcagttcagcagcagattccacgccaagacaggcagccctggcatcagatgtagcgtcgtgaccaaagagaagctgcaggacaatcggttcttcaagaatctgcagagagagggcagactgaccctggacaaaatcgccgtgctgaaagagggcgatctgtacccagacaaaggcggcgagaagttcatcagcctgagcaaggatcggaagtgcgtgaccacacacgccgacatcaacgccgctcagaacctgcagaagcggttctggacaagaacccacggcttctacaaggtgtactgcaaggcctaccaggtggacggaggctctggaggaagctccgaagtcgagttttcccatgagtactggatgagacacgcattgactctcgcaaagagggctcgagatgaacgcgaggtgcccgtgggggcagtactcgtgctcaacaatcgcgtaatcggcgaaggttggaatagggcaatcggactccacgaccccactgcacatgcggaaatcatggcccttcgacagggagggcttgtgatgcagaattatcgactttatgatgcgacgctgtacgtcacgtttgaaccttgcgtaatgtgcgcgggagctatgattcactcccgcattggacgagttgtattcggtgttcgcaacgccaagacgggtgccgcaggttcactgatggacgtgctgcatcatccaggcatgaaccaccgggtagaaatcacagaaggcatattggcggacgaatgtgcggcgctgttgtgtcgtttttttcgcatgcccaggcgggtctttaacgcccagaaaaaagcacaatcctctactgacggctcttctggatctgaaacacctggcacaagcgagagcgccacccctgagagctctggcggccagaccgtgtacatccctgagagcaaggaccagaagcagaagatcatcgaagagttcggcgagggctacttcattctgaaggacggggtgtacgaatgggtcaacgccggcaagctgaaaatcaagaagggcagctccaagcagagcagcagcgagctggtggatagcgacatcctgaaagacagcttcgacctggcctccgagctgaaaggcgaaaagctgatgctgtacagggaccccagcggcaatgtgttccccagcgacaaatggatggccgctggcgtgttcttcggaaagctggaacgcatcctgatcagcaagctgaccaaccagtactccatcagcaccatcgaggacgacagcagcaagcagtctatgaaaaggccggcggccacgaaaaaggccggccaggcaaaaaagaaaaagggatcctacccatacgatgttccagattacgcttatccctacgacgtgcctgattatgcatacccatatgatgtccccgactatgcctaa

SEQ ID NO: 281 - protein, 1361 aa, synthetic construct
MAPKKKRKVGIHGVPAAATRSFILKIEPNEEVKKGLWKTHEVLNHGIAYYMNILKLIRQEAIYEHHEQDPKNPKKVSKAEIQAELWDFVLKMQKCNSFTHEVDKDEVFNILRELYEELVPSSVEKKGEANQLSNKFLYPLVDPNSQSGKGTASSGRKPRWYNLKIAGDPSWEEEKKKWEEDKKKDPLAKILGKLAEYGLIPLFIPYTDSNEPIVKEIKWMEKSRNQSVRRLDKDMFIQALERFLSWESWNLKVKEEYEKVEKEYKTLEERIKEDIQALKALEQYEKERQEQLLRDTLNTNEYRLSKRGLRGWREIIQKWLKMDENEPSEKYLEVFKDYQRKHPREAGDYSVYEFLSKKENHFIWRNHPEYPYLYATFCEIDKKKKDAKQQATFTLADPINHPLWVRFEERSGSNLNKYRILTEQLHTEKLKKKLTVQLDRLIYPTESGGWEEKGKVDIVLLPSRQFYNQIFLDIEEKGKHAFTYKDESIKFPLKGTLGGARVQFDRDHLRRYPHKVESGNVGRIYFNMTVNIEPTESPVSKSLKIHRDDFPKVVNFKPKELTEWIKDSKGKKLKSGIESLEIGLRVMSIDLGQRQAAAASIFEVVDQKPDIEGKLFFPIKGTELYAVHRASFNIKLPGETLVKSREVLRKAREDNLKLMNQKLNFLRNVLHFQQFEDITEREKRVTKWISRQENSDVPLVYQDELIQIRELMYKPYKDWVAFLKQLHKRLEVEIGKEVKHWRKSLSDGRKGLYGISLKNIDEIDRTRKFLLRWSLRPTEPGEVRRLEPGQRFAIDQLNHLNALKEDRLKKMANTIIMHALGYCYDVRKKKWQAKNPACQIILFEDLSNYNPYEERSRFENSKLMKWSRREIPRQVALQGEIYGLQVGEVGAQFSSRFHAKTGSPGIRCSVVTKEKLQDNRFFKNLQREGRLTLDKIAVLKEGDLYPDKGGEKFISLSKDRKCVTTHADINAAQNLQKRFWTRTHGFYKVYCKAYQVDGGSGGSSEVEFSHEYWMRHALTLAKRARDEREVPVGAVLVLNNRVIGEGWNRAIGLHDPTAHAEIMALRQGGLVMQNYRLYDATLYVTFEPCVMCAGAMIHSRIGRVVFGVRNAKTGAAGSLMDVLHHPGMNHRVEITEGILADECAALLCRFFRMPRRVFNAQKKAQSSTDGSSGSETPGTSESATPESSGGQTVYIPESKDQKQKIIEEFGEGYFILKDGVYEWVNAGKLKIKKGSSKQSSSELVDSDILKDSFDLASELKGEKLMLYRDPSGNVFPSDKWMAAGVFFGKLERILISKLTNQYSISTIEDDSSKQSMKRPAATKKAGQAKKKKGSYPYDVPDYAYPYDVPDYAYPYDVPDYA

SEQ ID NO: 282 - DNA, 4092 bp, synthetic construct
  source 1..4092: mol_type = other DNA
gccaccatggccccaaagaagaagcggaaggtcggtatccacggagtcccagcagccgccaccagatccttcatcctgaagatcgagcccaacgaggaagtgaagaaaggcctctggaaaacccacgaggtgctgaaccacggaatcgcctactacatgaatatcctgaagctgatccggcaagaggccatctacgagcaccacgagcaggaccccaagaatcccaagaaggtgtccaaggccgagatccaggccgagctgtgggatttcgtgctgaagatgcagaagtgcaacagcttcacacacgaggtggacaaggacgaggtgttcaacatcctgagagagctgtacgaggaactggtgcccagcagcgtggaaaagaagggcgaagccaaccagctgagcaacaagtttctgtaccctctggtggaccccaacagccagtctggaaagggaacagccagcagcggcagaaagcccagatggtacaacctgaagattgccggcgatccctcctgggaagaagagaagaagaagtgggaagaagataagaaaaaggacccgctggccaagatcctgggcaagctggctgagtacggactgatccctctgttcatcccctacaccgacagcaacgagcccatcgtgaaagaaatcaagtggatggaaaagtcccggaaccagagcgtgcggcggctggataaggacatgttcattcaggccctggaacggttcctgagctgggagagctggaacctgaaagtgaaagaggaatacgagaaggtcgagaaagagtacaagaccctggaagagaggatcaaagaggacatccaggctctgaaggctctggaacagtatgagaaagagcggcaagaacagctgctgcgggacaccctgaacaccaacgagtaccggctgagcaagagaggccttagaggctggcgggaaatcatccagaaatggctgaaaatggacgagaacgagccctccgagaagtacctggaagtgttcaaggactaccagcggaagcaccctagagaggccggcgattacagcgtgtacgagttcctgtccaagaaagagaaccacttcatctggcggaatcaccctgagtacccctacctgtacgccaccttctgcgagatcgacaagaaaaagaaggacgccaagcagcaggccaccttcacactggccgatcctatcaatcaccctctgtgggtccgattcgaggaaagaagcggcagcaacctgaacaagtacagaatcctgaccgagcagctgcacaccgagaagctgaagaaaaagctgacagtgcagctggaccggctgatctaccctacagaatctggcggctgggaagagaagggcaaagtggacattgtgctgctgcccagccggcagttctacaaccagatcttcctggacatcgaggaaaagggcaagcacgccttcacctacaaggatgagagcatcaagttccctctgaagggcacactcggcggagccagagtgcagttcgacagagatcacctgagaagataccctcacaaggtggaaagcggcaacgtgggcagaatctacttcaacatgaccgtgaacatcgagcctacagagtccccagtgtccaagtctctgaagatccaccgggacgacttccccaaggtggtcaacttcaagcccaaagaactgaccgagtggatcaaggacagcaagggcaagaaactgaagtccggcatcgagtccctggaaatcggcctgagagtgatgagcatcgacctgggacagagacaggccgctgccgcctctattttcgaggtggtggatcagaagcccgacatcgaaggcaagctgtttttcccaatcaagggcaccgagctgtatgccgtgcacagagccagcttcaacatcaagctgcccggcgagacactggtcaagagcagagaagtgctgcggaaggccagagaggacaatctgaaactgatgaaccagaagctcaacttcctgcggaacgtgctgcacttccagcagttcgaggacatcaccgagagagagaagcgggtcaccaagtggatcagcagacaagagaacagcgacgtgcccctggtgtaccaggatgagctgatccagatccgcgagctgatgtacaagccttacaaggactgggtcgccttcctgaagcagctccacaagagactggaagtcgagatcggcaaagaagtgaagcactggcggaagtccctgagcgacggaagaaagggcctgtacggcatctccctgaagaacatcgacgagatcgatcggacccggaagttcctgctgagatggtccctgaggcctaccgaacctggcgaagtgcgtagactggaacccggccagagattcgccatcgaccagctgaatcacctgaacgccctgaaagaagatcggctgaagaagatggccaacaccatcatcatgcacgccctgggctactgctacgacgtgcggaagaagaaatggcaggctaagaaccccgcctgccagatcatcctgttcgaggatctgagcaactacaacccctacgaggaaaggtcccgcttcgagaacagcaagctcatgaagtggtccagacgcgagatccccagacaggttgcactgcagggcgagatctatggcctgcaagtgggagaagtgggcgctcagttcagcagcagattccacgccaagacaggcagccctggcatcagatgtagcgtcgtgaccaaagagaagctgcaggacaatcggttcttcaagaatctgcagagagagggcagactgaccctggacaaaatcgccgtgctgaaagagggcgatctgtacccagacaaaggcggcgagaagttcatcagcctgagcaaggatcggaagtgcgtgaccacacacgccgacatcaacgccgctcagaacctgcagaagcggttctggacaagaacccacggcttctacaaggtgtactgcaaggcctaccaggtggacggccagaccgtgtacatccctgagagcaaggaccagaagcagaagatcatcgaagagttcggcgagggctacttcattctgaaggacggggtgtacgaatgggtcaacgccggcaagggaggctctggaggaagctccgaagtcgagttttcccatgagtactggatgagacacgcattgactctcgcaaagagggctcgagatgaacgcgaggtgcccgtgggggcagtactcgtgctcaacaatcgcgtaatcggcgaaggttggaatagggcaatcggactccacgaccccactgcacatgcggaaatcatggcccttcgacagggagggcttgtgatgcagaattatcgactttatgatgcgacgctgtacgtcacgtttgaaccttgcgtaatgtgcgcgggagctatgattcactcccgcattggacgagttgtattcggtgttcgcaacgccaagacgggtgccgcaggttcactgatggacgtgctgcatcatccaggcatgaaccaccgggtagaaatcacagaaggcatattggcggacgaatgtgcggcgctgttgtgtcgtttttttcgcatgcccaggcgggtctttaacgcccagaaaaaagcacaatcctctactgacggctcttctggatctgaaacacctggcacaagcgagagcgccacccctgagagctctggcctgaaaatcaagaagggcagctccaagcagagcagcagcgagctggtggatagcgacatcctgaaagacagcttcgacctggcctccgagctgaaaggcgaaaagctgatgctgtacagggaccccagcggcaatgtgttccccagcgacaaatggatggccgctggcgtgttcttcggaaagctggaacgcatcctgatcagcaagctgaccaaccagtactccatcagcaccatcgaggacgacagcagcaagcagtctatgaaaaggccggcggccacgaaaaaggccggccaggcaaaaaagaaaaagggatcctacccatacgatgttccagattacgcttatccctacgacgtgcctgattatgcatacccatatgatgtccccgactatgcctaa

SEQ ID NO: 283 - protein, 1361 aa, synthetic construct
MAPKKKRKVGIHGVPAAATRSFILKIEPNEEVKKGLWKTHEVLNHGIAYYMNILKLIRQEAIYEHHEQDPKNPKKVSKAEIQAELWDFVLKMQKCNSFTHEVDKDEVFNILRELYEELVPSSVEKKGEANQLSNKFLYPLVDPNSQSGKGTASSGRKPRWYNLKIAGDPSWEEEKKKWEEDKKKDPLAKILGKLAEYGLIPLFIPYTDSNEPIVKEIKWMEKSRNQSVRRLDKDMFIQALERFLSWESWNLKVKEEYEKVEKEYKTLEERIKEDIQALKALEQYEKERQEQLLRDTLNTNEYRLSKRGLRGWREIIQKWLKMDENEPSEKYLEVFKDYQRKHPREAGDYSVYEFLSKKENHFIWRNHPEYPYLYATFCEIDKKKKDAKQQATFTLADPINHPLWVRFEERSGSNLNKYRILTEQLHTEKLKKKLTVQLDRLIYPTESGGWEEKGKVDIVLLPSRQFYNQIFLDIEEKGKHAFTYKDESIKFPLKGTLGGARVQFDRDHLRRYPHKVESGNVGRIYFNMTVNIEPTESPVSKSLKIHRDDFPKVVNFKPKELTEWIKDSKGKKLKSGIESLEIGLRVMSIDLGQRQAAAASIFEVVDQKPDIEGKLFFPIKGTELYAVHRASFNIKLPGETLVKSREVLRKAREDNLKLMNQKLNFLRNVLHFQQFEDITEREKRVTKWISRQENSDVPLVYQDELIQIRELMYKPYKDWVAFLKQLHKRLEVEIGKEVKHWRKSLSDGRKGLYGISLKNIDEIDRTRKFLLRWSLRPTEPGEVRRLEPGQRFAIDQLNHLNALKEDRLKKMANTIIMHALGYCYDVRKKKWQAKNPACQIILFEDLSNYNPYEERSRFENSKLMKWSRREIPRQVALQGEIYGLQVGEVGAQFSSRFHAKTGSPGIRCSVVTKEKLQDNRFFKNLQREGRLTLDKIAVLKEGDLYPDKGGEKFISLSKDRKCVTTHADINAAQNLQKRFWTRTHGFYKVYCKAYQVDGQTVYIPESKDQKQKIIEEFGEGYFILKDGVYEWVNAGKGGSGGSSEVEFSHEYWMRHALTLAKRARDEREVPVGAVLVLNNRVIGEGWNRAIGLHDPTAHAEIMALRQGGLVMQNYRLYDATLYVTFEPCVMCAGAMIHSRIGRVVFGVRNAKTGAAGSLMDVLHHPGMNHRVEITEGILADECAALLCRFFRMPRRVFNAQKKAQSSTDGSSGSETPGTSESATPESSGLKIKKGSSKQSSSELVDSDILKDSFDLASELKGEKLMLYRDPSGNVFPSDKWMAAGVFFGKLERILISKLTNQYSISTIEDDSSKQSMKRPAATKKAGQAKKKKGSYPYDVPDYAYPYDVPDYAYPYDVPDYA

SEQ ID NO: 284 - skipped

SEQ ID NO: 285 - protein, 707 aa, unidentified
MADTPTLFTQFLRHHLPGQRFRKDILKQAGRILANKGEDATIAFLRGKSEESPPDFQPPVKCPIIACSRPLTEWPIYQASVAIQGYVYGQSLAEFEASDPGCSKDGLLGWFDKTGVCTDYFSVQGLNLIFQNARKRYIGVQTKVTNRNEKRHKKLKRINAKRIAEGLPELTSDEPESALDETGHLIDPPGLNTNIYCYQQVSPKPLALSEVNQLPTAYAGYSTSGDDPIQPMVTKDRLSISKGQPGYIPEHQRALLSQKKHRRMRGYGLKARALLVIVRIQDDWAVIDLRSLLRNAYWRRIVQTKEPSTITKLLKLVTGDPVLDATRMVATFTYKPGIVQVRSAKCLKNKQGSKLFSERYLNETVSVTSIDLGSNNLVAVATYRLVNGNTPELLQRFTLPSHLVKDFERYKQAHDTLEDSIQKTAVASLPQGQQTEIRMWSMYGFREAQERVCQELGLADGSIPWNVMTATSTILTDLFLARGGDPKKCMFTSEPKKKKNSKQVLYKIRDRAWAKMYRTLLSKETREAWNKALWGLKRGSPDYARLSKRKEELARRCVNYTISTAEKRAQCGRTIVALEDLNIGFFHGRGKQEPGWVGLFTRKKENRWLMQALHKAFLELAHHRGYHVIEVNPAYTSQTCPVCRHCDPDNRDQHNREAFHCIGCGFRGNADLDVATHNIAMVAITGESLKRARGSVASKTPQPLAAE

SEQ ID NO: 286 - protein, 757 aa, unidentified
MPKPAVESEFSKVLKKHFPGERFRSSYMKRGGKILAAQGEEAVVAYLQGKSEEEPPNFQPPAKCHVVTKSRDFAEWPIMKASEAIQRYIYALSTTERAACKPGKSSESHAAWFAATGVSNHGYSHVQGLNLIFDHTLGRYDGVLKKVQLRNEKARARLESINASRADEGLPEIKAEEEEVATNETGHLLQPPGINPSFYVYQTISPQAYRPRDEIVLPPEYAGYVRDPNAPIPLGVVRNRCDIQKGCPGYIPEWQREAGTAISPKTGKAVTVPGLSPKKNKRMRRYWRSEKEKAQDALLVTVRIGTDWVVIDVRGLLRNARWRTIAPKDISLNALLDLFTGDPVIDVRRNIVTFTYTLDACGTYARKWTLKGKQTKATLDKLTATQTVALVAIDLGQTNPISAGISRVTQENGALQCEPLDRFTLPDDLLKDISAYRIAWDRNEEELRARSVEALPEAQQAEVRALDGVSKETARTQLCADFGLDPKRLPWDKMSSNTTFISEALLSNSVSRDQVFFTPAPKKGAKKKAPVEVMRKDRTWARAYKPRLSVEAQKLKNEALWALKRTSPEYLKLSRRKEELCRRSINYVIEKTRRRTQCQIVIPVIEDLNVRFFHGSGKRLPGWDNFFTAKKENRWFIQGLHKAFSDLRTHRSFYVFEVRPERTSITCPKCGHCEVGNRDGEAFQCLSCGKTCNADLDVATHNLTQVALTGKTMPKREEPRDAQGTAPARKTKKASKSKAPPAEREDQTPAQEPSQTS

SEQ ID NO: 287 - protein, 766 aa, unidentified
MEKEITELTKIRREFPNKKFSSTDMKKAGKLLKAEGPDAVRDFLNSCQEIIGDFKPPVKTNIVSISRPFEEWPVSMVGRAIQEYYFSLTKEELESVHPGTSSEDHKSFFNITGLSNYNYTSVQGLNLIFKNAKAIYDGTLVKANNKNKKLEKKFNEINHKRSLEGLPIITPDFEEPFDENGHLNNPPGINRNIYGYQGCAAKVFVPSKHKMVSLPKEYEGYNRDPNLSLAGFRNRLEIPEGEPGHVPWFQRMDIPEGQIGHVNKIQRFNFVHGKNSGKVKFSDKTGRVKRYHHSKYKDATKPYKFLEESKKVSALDSILAIITIGDDWVVFDIRGLYRNVFYRELAQKGLTAVQLLDLFTGDPVIDPKKGVVTFSYKEGVVPVFSQKIVPRFKSRDTLEKLTSQGPVALLSVDLGQNEPVAARVCSLKNINDKITLDNSCRISFLDDYKKQIKDYRDSLDELEIKIRLEAINSLETNQQVEIRDLDVFSADRAKANTVDMFDIDPNLISWDSMSDARVSTQISDLYLKNGGDESRVYFEINNKRIKRSDYNISQLVRPKLSDSTRKNLNDSIWKLKRTSEEYLKLSKRKLELSRAVVNYTIRQSKLLSGINDIVIILEDLDVKKKFNGRGIRDIGWDNFFSSRKENRWFIPAFHKAFSELSSNRGLCVIEVNPAWTSATCPDCGFCSKENRDGINFTCRKCGVSYHADIDVATLNIARVAVLGKPMSGPADRERLGDTKKPRVARSRKTMKRKDISNSTVEAMVTA

SEQ ID NO: 288 - protein, 765 aa, unidentified
MYSLEMADLKSEPSLLAKLLRDRFPGKYWLPKYWKLAEKKRLTGGEEAACEYMADKQLDSPPPNFRPPARCVILAKSRPFEDWPVHRVASKAQSFVIGLSEQGFAALRAAPPSTADARRDWLRSHGASEDDLMALEAQLLETIMGNAISLHGGVLKKIDNANVKAAKRLSGRNEARLNKGLQELPPEQEGSAYGADGLLVNPPGLNLNIYCRKSCCPKPVKNTARFVGHYPGYLRDSDSILISGTMDRLTIIEGMPGHIPAWQREQGLVKPGGRRRRLSGSESNMRQKVDPSTGPRRSTRSGTVNRSNQRTGRNGDPLLVEIRMKEDWVLLDARGLLRNLRWRESKRGLSCDHEDLSLSGLLALFSGDPVIDPVRNEVVFLYGEGIIPVRSTKPVGTRQSKKLLERQASMGPLTLISCDLGQTNLIAGRASAISLTHGSLGVRSSVRIELDPEIIKSFERLRKDADRLETEILTAAKETLSDEQRGEVNSHEKDSPQTAKASLCRELGLHPPSLPWGQMGPSTTFIADMLISHGRDDDAFLSHGEFPTLEKRKKFDKRFCLESRPLLSSETRKALNESLWEVKRTSSEYARLSQRKKEMARRAVNFVVEISRRKTGLSNVIVNIEDLNVRIFHGGGKQAPGWDGFFRPKSENRWFIQAIHKAFSDLAAHHGIPVIESDPQRTSMTCPECGHCDSKNRNGVRFLCKGCGASMDADFDAACRNLERVALTGKPMPKPSTSCERLLSATTGKVCSDHSLSHDAIEKAS

SEQ ID NO: 289 - protein, 793 aa, unidentified
MSSLPTPLELLKQKHADLFKGLQFSSKDNKMAGKVLKKDGEEAALAFLSERGVSRGELPNFRPPAKTLVVAQSRPFEEFPIYRVSEAIQLYVYSLSVKELETVPSGSSTKKEHQRFFQDSSVPDFGYTSVQGLNKIFGLARGIYLGVITRGENQLQKAKSKHEALNKKRRASGEAETEFDPTPYEYMTPERKLAKPPGVNHSIMCYVDISVDEFDFRNPDGIVLPSEYAGYCREINTAIEKGTVDRLGHLKGGPGYIPGHQRKESTTEGPKINFRKGRIRRSYTALYAKRDSRRVRQGKLALPSYRHHMMRLNSNAESAILAVIFFGKDWVVFDLRGLLRNVRWRNLFVDGSTPSTLLGMFGDPVIDPKRGVVAFCYKEQIVPVVSKSITKMVKAPELLNKLYLKSEDPLVLVAIDLGQTNPVGVGVYRVMNASLDYEVVTRFALESELLREIESYRQRTNAFEAQIRAETFDAMTSEEQEEITRVRAFSASKAKENVCHRFGMPVDAVDWATMGSNTIHIAKWVMRHGDPSLVEVLEYRKDNEIKLDKNGVPKKVKLTDKRIANLTSIRLRFSQETSKHYNDTMWELRRKHPVYQKLSKSKADFSRRVVNSIIRRVNHLVPRARIVFIIEDLKNLGKVFHGSGKRELGWDSYFEPKSENRWFIQVLHKAFSETGKHKGYYIIECWPNWTSCTCPKCSCCDSENRHGEVFRCLACGYTCNTDFGTAPDNLVKIATTGKGLPGPKKRCKGSSKGKNPKIARSSETGVSVTESGAPKVKKSSPTQTSQSSSQSAP

SEQ ID NO: 290 - protein, 441 aa, unidentified
MNKIEKEKTPLAKLMNENFAGLRFPFAIIKQAGKKLLKEGELKTIEYMTGKGSIEPLPNFKPPVKCLIVAKRRDLKYFPICKASCEIQSYVYSLNYKDFMDYFSTPMTSQKQHEEFFKKSGLNIEYQNVAGLNLIFNNVKNTYNGVILKVKNRNEKLKKKAIKNNYEFEEIKTFNDDGCLINKPGINNVIYCFQSISPKILKNITHLPKEYNDYDCSVDRNIIQKYVSRLDIPESQPGHVPEWQRKLPEFNNTNNPRRRRKWYSNGRNISKGYSVDQVNQAKIEDSLLAQIKIGEDWIILDIRGLLRDLNRRELISYKNKLTIKDVLGFFSDYPIIDIKKNLVTFCYKEGVIQVVSQKSIGNKKSKQLLEKLIENKPIALVSIDLGQTNPVSVKISKLNKINNKISIESFTYRFLNEEILKEIEKYRKDYDKLELKLINEA

SEQ ID NO: 291 - protein, 772 aa, unidentified
MSNTAVSTREHMSNKTTPPSPLSLLLRAHFPGLKFESQDYKIAGKKLRDGGPEAVISYLTGKGQAKLKDVKPPAKAFVIAQSRPFIEWDLVRVSRQIQEKIFGIPATKGRPKQDGLSETAFNEAVASLEVDGKSKLNEETRAAFYEVLGLDAPSLHAQAQNALIKSAISIREGVLKKVENRNEKNLSKTKRRKEAGEEATFVEEKAHDERGYLIHPPGVNQTIPGYQAVVIKSCPSDFIGLPSGCLAKESAEALTDYLPHDRMTIPKGQPGYVPEWQHPLLNRRKNRRRRDWYSASLNKPKATCSKRSGTPNRKNSRTDQIQSGRFKGAIPVLMRFQDEWVIIDIRGLLRNARYRKLLKEKSTIPDLLSLFTGDPSIDMRQGVCTFIYKAGQACSAKMVKTKNAPEILSELTKSGPVVLVSIDLGQTNPIAAKVSRVTQLSDGQLSHETLLRELLSNDSSDGKEIARYRVASDRLRDKLANLAVERLSPEHKSEILRAKNDTPALCKARVCAALGLNPEMIAWDKMTPYTEFLATAYLEKGGDRKVATLKPKNRPEMLRRDIKFKGTEGVRIEVSPEAAEAYREAQWDLQRTSPEYLRLSTWKQELTKRILNQLRHKAAKSSQCEVVVMAFEDLNIKMMHGNGKWADGGWDAFFIKKRENRWFMQAFHKSLTELGAHKGVPTIEVTPHRTSITCTKCGHCDKANRDGERFACQKCGFVAHADLEIATDNIERVALTGKPMPKPESERSGDAKKSVGARKAAFKPEEDAEAAE

SEQ ID NO: 292 - protein, 717 aa, unidentified
MIKPTVSQFLTPGFKLIRNHSRTAGLKLKNEGEEACKKFVRENEIPKDECPNFQGGPAIANIIAKSREFTEWEIYQSSLAIQEVIFTLPKDKLPEPILKEEWRAQWLSEHGLDTVPYKEAAGLNLIIKNAVNTYKGVQVKVDNKNKNNLAKINRKNEIAKLNGEQEISFEEIKAFDDKGYLLQKPSPNKSIYCYQSVSPKPFITSKYHNVNLPEEYIGYYRKSNEPIVSPYQFDRLRIPIGEPGYVPKWQYTFLSKKENKRRKLSKRIKNVSPILGIICIKKDWCVFDMRGLLRTNHWKKYHKPTDSINDLFDYFTGDPVIDTKANVVRFRYKMENGIVNYKPVREKKGKELLENICDQNGSCKLATVDVGQNNPVAIGLFELKKVNGELTKTLISRHPTPIDFCNKITAYRERYDKLESSIKLDAIKQLTSEQKIEVDNYNNNFTPQNTKQIVCSKLNINPNDLPWDKMISGTHFISEKAQVSNKSEIYFTSTDKGKTKDVMKSDYKWFQDYKPKLSKEVRDALSDIEWRLRRESLEFNKLSKSREQDARQLANWISSMCDVIGIENLVKKNNFFGGSGKREPGWDNFYKPKKENRWWINAIHKALTELSQNKGKRVILLPAMRTSITCPKCKYCDSKNRNGEKFNCLKCGIELNADIDVATENLATVAITAQSMPKPTCERSGDAKKPVRARKAKAPEFHDKLAPSYTVVLREAV

SEQ ID NO: 293 - protein, 793 aa, unidentified
MRSSREIGDKILMRQPAEKTAFQVFRQEVIGTQKLSGGDAKTAGRLYKQGKMEAAREWLLKGARDDVPPNFQPPAKCLVVAVSHPFEEWDISKTNHDVQAYIYAQPLQAEGHLNGLSEKWEDTSADQHKLWFEKTGVPDRGLPVQAINKIAKAAVNRAFGVVRKVENRNEKRRSRDNRIAEHNRENGLTEVVREAPEVATNADGFLLHPPGIDPSILSYASVSPVPYNSSKHSFVRLPEEYQAYNVEPDAPIPQFVVEDRFAIPPGQPGYVPEWQRLKCSTNKHRRMRQWSNQDYKPKAGRRAKPLEFQAHLTRERAKGALLVVMRIKEDWVVFDVRGLLRNVEWRKVLSEEAREKLTLKGLLDLFTGDPVIDTKRGIVTFLYKAEITKILSKRTVKTKNARDLLLRLTEPGEDGLRREVGLVAVDLGQTHPIAAAIYRIGRTSAGALESTVLHRQGLREDQKEKLKEYRKRHTALDSRLRKEAFETLSVEQQKEIVTVSGSGAQITKDKVCNYLGVDPSTLPWEKMGSYTHFISDDFLRRGGDPNIVHFDRQPKKGKVSKKSQRIKRSDSQWVGRMRPRLSQETAKARMEADWAAQNENEEYKRLARSKQELARWCVNTLLQNTRCITQCDEIVVVIEDLNVKSLHGKGAREPGWDNFFTPKTENRWFIQILHKTFSELPKHRGEHVIEGCPLRTSITCPACSYCDKNSRNGEKFVCVACGATFHADFEVATYNLVRLATTGMPMPKSLERQGGGEKAGGARKARKKAKQVEKIVVQANANVTMNGASLHSP

SEQ ID NO: 294 - protein, 812 aa, unidentified
MDMLDTETNYATETPAQQQDYSPKPPKKAQRAPKGFSKKARPEKKPPKPITLFTQKHFSGVRFLKRVIRDASKILKLSESRTITFLEQAIERDGSAPPDVTPPVHNTIMAVTRPFEEWPEVILSKALQKHCYALTKKIKIKTWPKKGPGKKCLAAWSARTKIPLIPGQVQATNGLFDRIGSIYDGVEKKVTNRNANKKLEYDEAIKEGRNPAVPEYETAYNIDGTLINKPGYNPNLYITQSRTPRLITEADRPLVEKILWQMVEKKTQSRNQARRARLEKAAHLQGLPVPKFVPEKVDRSQKIEIRIIDPLDKIEPYMPQDRMAIKASQDGHVPYWQRPFLSKRRNRRVRAGWGKQVSSIQAWLTGALLVIVRLGNEAFLADIRGALRNAQWRKLLKPDATYQSLFNLFTGDPVVNTRTNHLTMAYREGVVNIVKSRSFKGRQTREHLLTLLGQGKTVAGVSFDLGQKHAAGLLAAHFGLGEDGNPVFTPIQACFLPQRYLDSLTNYRNRYDALTLDMRRQSLLALTPAQQQEFADAQRDPGGQAKRACCLKLNLNPDEIRWDLVSGISTMISDLYIERGGDPRDVHQQVETKPKGKRKSEIRILKIRDGKWAYDFRPKIADETRKAQREQLWKLQKASSEFERLSRYKINIARAIANWALQWGRELSGCDIVIPVLEDLNVGSKFFDGKGKWLLGWDNRFTPKKENRWFIKVLHKAVAELAPHRGVPVYEVMPHRTSMTCPACHYCHPTNREGDRFECQSCHVVKNTDRDVAPYNILRVAVEGKTLDRWQAEKKPQAEPDRPMILIDNQES

SEQ ID NO: 295-1303 - skipped (1009 entries)

SEQ ID NO: 1304 - protein, 1368 aa, synthetic construct
MDKKYSIGLAIGTNSVGWAVITDEYKVPSKKFKVLGNTDRHSIKKNLIGALLFDSGETAEATRLKRTARRRYTRRKNRICYLQEIFSNEMAKVDDSFFHRLEESVLVEEDKKHERHPIFGNIVDEVAYHEKYPTIYHLRKKLVDSTDKADLRLIYLALAHMIKFRGHFLIEGDLNPDNSDVDKLFIQLVQTYNQLFEENPINASGVDAKAILSARLSKSRRLENLIAQLPGEKKNGLFGNLIALSLGLTPNFKSNFDLAEDAKLQLSKDTYDDDLDNLLAQIGDQYADLFLAAKNLSDAILLSDILRVNTEITKAPLSASMIKRYDEHHQDLTLLKALVRQQLPEKYKEIFFDQSKNGYAGYIDGGASQEEFYKFIKPILEKMDGTEELLVKLNREDLLRKQRTFDNGSIPHQIHLGELHAILRRQEDFYPFLKDNREKIEKILTFRIPYYVGPLARGNSRFAWMTRKSEETITPWNFEEVVDKGASAQSFIERMTNFDKNLPNEKVLPKHSLLYEYFTVYNELTKVKYVTEGMRKPAFLSGEQKKAIVDLLFKTNRKVTVKQLKEDYFKKIECFDSVEISGVEDRFNASLGTYHDLLKIIKDKDFLDNEENEDILEDIVLTLTLFEDREMIEERLKTYAHLFDDKVMKQLKRRRYTGWGRLSRKLINGIRDKQSGKTILDFLKSDGFANRNFMQLIHDDSLTFKEDIQKAQVSGQGDSLHEHIANLAGSPAIKKGILQTVKVVDELVKVMGRHKPENIVIEMARENQTTQKGQKNSRERMKRIEEGIKELGSQILKEHPVENTQLQNEKLYLYYLQNGRDMYVDQELDINRLSDYDVDHIVPQSFLKDDSIDNKVLTRSDKNRGKSDNVPSEEVVKKMKNYWRQLLNAKLITQRKFDNLTKAERGGLSELDKAGFIKRQLVETRQITKHVAQILDSRMNTKYDENDKLIREVKVITLKSKLVSDFRKDFQFYKVREINNYHHAHDAYLNAVVGTALIKKYPKLESEFVYGDYKVYDVRKMIAKSEQEIGKATAKYFFYSNIMNFFKTEITLANGEIRKRPLIETNGETGEIVWDKGRDFATVRKVLSMPQVNIVKKTEVQTGGFSKESILPKRNSDKLIARKKDWDPKKYGGFESPTVAYSVLVVAKVEKGKSKKLKSVKELLGITIMERSSFEKNPIDFLEAKGYKEVKKDLIIKLPKYSLFELENGRKRMLASAGELQKGNELALPSKYVNFLYLASHYEKLKGSPEDNEQKQLFVEQHKHYLDEIIEQISEFSKRVILADANLDKVLSAYNKHRDKPIREQAENIIHLFTLTNLGAPAAFKYFDTTIDRKQYRSTKEVLDATLIHQSITGLYETRIDLSQLGGD

SEQ ID NO: 1305 - protein, 1368 aa, synthetic construct
MDKKYSIGLAIGTNSVGWAVITDEYKVPSKKFKVLGNTDRHSIKKNLIGALLFDSGETAEATRLKRTARRRYTRRKNRICYLQEIFSNEMAKVDDSFFHRLEESFLVEEDKKHERHPIFGNIVDEVAYHEKYPTIYHLRKKLVDSTDKADLRLIYLALAHMIKFRGHFLIEGDLNPDNSDVDKLFIQLVQTYNQLFEENPINASGVDAKAILSARLSKSRRLENLIAQLPGEKKNGLFGNLIALSLGLTPNFKSNFDLAEDAKLQLSKDTYDDDLDNLLAQIGDQYADLFLAAKNLSDAILLSDILRVNTEITKAPLSASMIKRYDEHHQDLTLLKALVRQQLPEKYKEIFFDQSKNGYAGYIDGGASQEEFYKFIKPILEKMDGTEELLVKLNREDLLRKQRTFDNGSIPHQIHLGELHAILRRQEDFYPFLKDNREKIEKILTFRIPYYVGPLARGNSRFAWMTRKSEETITPWNFEEVVDKGASAQSFIERMTNFDKNLPNEKVLPKHSLLYEYFTVYNELTKVKYVTEGMRKPAFLSGEQKKAIVDLLFKTNRKVTVKQLKEDYFKKIECFDSVEISGVEDRFNASLGTYHDLLKIIKDKDFLDNEENEDILEDIVLTLTLFEDREMIEERLKTYAHLFDDKVMKQLKRRRYTGWGRLSRKLINGIRDKQSGKTILDFLKSDGFANRNFMQLIHDDSLTFKEDIQKAQVSGQGDSLHEHIANLAGSPAIKKGILQTVKVVDELVKVMGRHKPENIVIEMARENQTTQKGQKNSRERMKRIEEGIKELGSQILKEHPVENTQLQNEKLYLYYLQNGRDMYVDQELDINRLSDYDVDHIVPQSFLKDDSIDNKVLTRSDKNRGKSDNVPSEEVVKKMKNYWRQLLNAKLITQRKFDNLTKAERGGLSELDKAGFIKRQLVETRQITKHVAQILDSRMNTKYDENDKLIREVKVITLKSKLVSDFRKDFQFYKVREINNYHHAHDAYLNAVVGTALIKKYPKLESEFVYGDYKVYDVRKMIAKSEQEIGKATAKYFFYSNIMNFFKTEITLANGEIRKRPLIETNGETGEIVWDKGRDFATVRKVLSMPQVNIVKKTEVQTGGFSKESILPKRNSDKLIARKKDWDPKKYGGFVSPTVAYSVLVVAKVEKGKSKKLKSVKELLGITIMERSSFEKNPIDFLEAKGYKEVKKDLIIKLPKYSLFELENGRKRMLASAGELQKGNELALPSKYVNFLYLASHYEKLKGSPEDNEQKQLFVEQHKHYLDEIIEQISEFSKRVILADANLDKVLSAYNKHRDKPIREQAENIIHLFTLTNLGAPAAFKYFDTTIDRKQYRSTKEVLDATLIHQSITGLYETRIDLSQLGGD

SEQ ID NO: 1306 - protein, 1368 aa, synthetic construct
MDKKYSIGLAIGTNSVGWAVITDEYKVPSKKFKVLGNTDRHSIKKNLIGALLFDSGETAEATRLKRTARRRYTRRKNRICYLQEIFSNEMAKVDDSFFHRLEESFLVEEDKKHERHPIFGNIVDEVAYHEKYPTIYHLRKKLVDSTDKADLRLIYLALAHMIKFRGHFLIEGDLNPDNSDVDKLFIQLVQTYNQLFEENPINASGVDAKAILSARLSKSRRLENLIAQLPGEKKNGLFGNLIALSLGLTPNFKSNFDLAEDAKLQLSKDTYDDDLDNLLAQIGDQYADLFLAAKNLSDAILLSDILRVNTEITKAPLSASMIKRYDEHHQDLTLLKALVRQQLPEKYKEIFFDQSKNGYAGYIDGGASQEEFYKFIKPILEKMDGTEELLVKLNREDLLRKQRTFDNGSIPHQIHLGELHAILRRQEDFYPFLKDNREKIEKILTFRIPYYVGPLARGNSRFAWMTRKSEETITPWNFEEVVDKGASAQSFIERMTNFDKNLPNEKVLPKHSLLYEYFTVYNELTKVKYVTEGMRKPAFLSGEQKKAIVDLLFKTNRKVTVKQLKEDYFKKIECFDSVEISGVEDRFNASLGTYHDLLKIIKDKDFLDNEENEDILEDIVLTLTLFEDREMIEERLKTYAHLFDDKVMKQLKRRRYTGWGRLSRKLINGIRDKQSGKTILDFLKSDGFANRNFMQLIHDDSLTFKEDIQKAQVSGQGDSLHEHIANLAGSPAIKKGILQTVKVVDELVKVMGRHKPENIVIEMARENQTTQKGQKNSRERMKRIEEGIKELGSQILKEHPVENTQLQNEKLYLYYLQNGRDMYVDQELDINRLSDYDVDHIVPQSFLKDDSIDNKVLTRSDKNRGKSDNVPSEEVVKKMKNYWRQLLNAKLITQRKFDNLTKAERGGLSELDKAGFIKRQLVETRQITKHVAQILDSRMNTKYDENDKLIREVKVITLKSKLVSDFRKDFQFYKVREINNYHHAHDAYLNAVVGTALIKKYPKLESEFVYGDYKVYDVRKMIAKSEQEIGKATAKYFFYSNIMNFFKTEITLANGEIRKRPLIETNGETGEIVWDKGRDFATVRKVLSMPQVNIVKKTEVQTGGFSKESILPKRNSDKLIARKKDWDPKKYGGFVSPTVAYSVLVVAKVEKGKSKKLKSVKELLGITIMERSSFEKNPIDFLEAKGYKEVKKDLIIKLPKYSLFELENGRKRMLASARELQKGNELALPSKYVNFLYLASHYEKLKGSPEDNEQKQLFVEQHKHYLDEIIEQISEFSKRVILADANLDKVLSAYNKHRDKPIREQAENIIHLFTLTNLGAPAAFKYFDTTIDRKEYRSTKEVLDATLIHQSITGLYETRIDLSQLGGD

SEQ ID NO: 1307 - protein, 1359 aa, synthetic construct
MDKKYSIGLDIGTNSVGWAVITDDYKVPSKKFKVLGNTDRHSIKKNLIGALLFGSGETAEATRLKRTARRRYTRRKNRICYLQEIFSNEMAKVDDSFFHRLEESFLVEEDKKHERHPIFGNIVDEVAYHEKYPTIYHLRKKLADSTDKADLRLIYLALAHMIKFRGHFLIEGDLNPDNSDVDKLFIQLVQIYNQLFEENPINASRVDAKAILSARLSKSRRLENLIAQLPGEKRNGLFGNLIALSLGLTPNFKSNFDLAEDAKLQLSKDTYDDDLDNLLAQIGDQYADLFLAAKNLSDAILLSDILRVNSEITKAPLSASMIKRYDEHHQDLTLLKALVRQQLPEKYKEIFFDQSKNGYAGYIDGGASQEEFYKFIKPILEKMDGTEELLVKLNREDLLRKQRTFDNGSIPHQIHLGELHAILRRQEDFYPFLKDNREKIEKILTFRIPYYVGPLARGNSRFAWMTRKSEETITPWNFEEVVDKGASAQSFIERMTNFDKNLPNEKVLPKHSLLYEYFTVYNELTKVKYVTEGMRKPAFLSGEQKKAIVDLLFKTNRKVTVKQLKEDYFKKIECFDSVEISGVEDRFNASLGAYHDLLKIIKDKDFLDNEENEDILEDIVLTLTLFEDRGMIEERLKTYAHLFDDKVMKQLKRRRYTGWGRLSRKLINGIRDKQSGKTILDFLKSDGFANRNFMQLIHDDSLTFKEDIQKAQVSGQGHSLHEQIANLAGSPAIKKGILQTVKIVDELVKVMGHKPENIVIEMARENQTTQKGQKNSRERMKRIEEGIKELGSQILKEHPVENTQLQNEKLYLYYLQNGRDMYVDQELDINRLSDYDVDHIVPQSFIKDDSIDNKVLTRSDKNRGKSDNVPSEEVVKKMKNYWRQLLNAKLITQRKFDNLTKAERGGLSELDKAGFIKRQLVETRQITKHVAQILDSRMNTKYDENDKLIREVKVITLKSKLVSDFRKDFQFYKVREINNYHHAHDAYLNAVVGTALIKKYPKLESEFVYGDYKVYDVRKMIAKSEQEIGKATAKYFFYSNIMNFFKTEITLANGEIRKRPLIETNGETGEIVWDKGRDFATVRKVLSMPQVNIVKKTEIQTVGQNGGLFDDNPKSPLEVTPSKLVPLKKELNPKKYGGYQKPTTAYPVLLITDTKQLIPISVMNKKQFEQNPVKFLRDRGYQQVGKNDFIKLPKYTLVDIGDGIKRLWASSKEIHKGNQLVVSKKSQILLYHAHHLDSDLSNDYLQNHNQQFDVLFNEIISFSKKCKLGKEHIQKIENVYSNKKNSASIEELAESFIKLLGFTQLGATSPFNFLGVKLNQKQYKGKKDYILPCTEGTLIRQSITGLYETRVDLSKIGED

SEQ ID NO: 1308 - protein, 4 aa, synthetic construct
GGGS

SEQ ID NO: 1309 - protein, 5 aa, synthetic construct
EAAAK

SEQ ID NO: 1310 - protein, 20 aa, synthetic construct
GSSGSETPGTSESATPESSG

SEQ ID NO: 1311 - DNA, 18 bp, synthetic construct
  source 1..18: mol_type = other DNA
ggaggctctggaggaagc

SEQ ID NO: 1312 - DNA, 60 bp, synthetic construct
  source 1..60: mol_type = other DNA
ggctcttctggatctgaaacacctggcacaagcgagagcgccacccctgagagctctggc

SEQ ID NO: 1313 - protein, 17 aa, synthetic construct
MAPKKKRKVGIHGVPAA

SEQ ID NO: 1314 - DNA, 51 bp, synthetic construct
  source 1..51: mol_type = other DNA
atggccccaaagaagaagcggaaggtcggtatccacggagtcccagcagcc

SEQ ID NO: 1315 - protein, 1554 aa, synthetic construct
MDKKYSIGLAIGTNSVGWAVITDEYKVPSKKFKVLGNTDRHSIKKNLIGALLFDSGETAEATRLKRTARRRYTRRKNRICYLQEIFSNEMAKVDDSFFHRLEESFLVEEDKKHERHPIFGNIVDEVAYHEKYPTIYHLRKKLVDSTDKADLRLIYLALAHMIKFRGHFLIEGDLNPDNSDVDKLFIQLVQTYNQLFEENPINASGVDAKAILSARLSKSRRLENLIAQLPGEKKNGLFGNLIALSLGLTPNFKSNFDLAEDAKLQLSKDTYDDDLDNLLAQIGDQYADLFLAAKNLSDAILLSDILRVNTEITKAPLSASMIKRYDEHHQDLTLLKALVRQQLPEKYKEIFFDQSKNGYAGYIDGGASQEEFYKFIKPILEKMDGTEELLVKLNREDLLRKQRTFDNGSIPHQIHLGELHAILRRQEDFYPFLKDNREKIEKILTFRIPYYVGPLARGNSRFAWMTRKSEETITPWNFEEVVDKGASAQSFIERMTNFDKNLPNEKVLPKHSLLYEYFTVYNELTKVKYVTEGMRKPAFLSGEQKKAIVDLLFKTNRKVTVKQLKEDYFKKIECFDSVEISGVEDRFNASLGTYHDLLKIIKDKDFLDNEENEDILEDIVLTLTLFEDREMIEERLKTYAHLFDDKVMKQLKRRRYTGWGRLSRKLINGIRDKQSGKTILDFLKSDGFANRNFMQLIHDDSLTFKEDIQKAQVSGQGDSLHEHIANLAGSPAIKKGILQTVKVVDELVKVMGRHKPENIVIEMARENQTTQKGQKNSRERMKRIEEGIKELGSQILKEHPVENTQLQNEKLYLYYLQNGRDMYVDQELDINRLSDYDVDHIVPQSFLKDDSIDNKVLTRSDKNRGKSDNVPSEEVVKKMKNYWRQLLNAKLITQRKFDNLTKAERGGLSELDKAGFIKRQLVETRQITKHVAQILDSRMNTKYDENDKLIREVKVITLKSKLVSDFRKDFQFYKVREINNYHHAHDAYLNAVVGTALIKKYPKLESEFVYGDYKVGSSGSETPGTSESATPESSGSEVEFSHEYWMRHALTLAKRARDEREVPVGAVLVLNNRVIGEGWNRAIGLHDPTAHAEIMALRQGGLVMQNYRLIDATLYVTFEPCVMCAGAMIHSRIGRVVFGVRNAKTGAAGSLMDVLHYPGMNHRVEITEGILADECAALLCYFFRMPRQVFNAQKKAQSSTDYDVRKMIAKSEQEIGKATAKYFFYSNIMNFFKTEITLANGEIRKRPLIETNGETGEIVWDKGRDFATVRKVLSMPQVNIVKKTEVQTGGFSKESILPKRNSDKLIARKKDWDPKKYGGFDSPTVAYSVLVVAKVEKGKSKKLKSVKELLGITIMERSSFEKNPIDFLEAKGYKEVKKDLIIKLPKYSLFELENGRKRMLASAGELQKGNELALPSKYVNFLYLASHYEKLKGSPEDNEQKQLFVEQHKHYLDEIIEQISEFSKRVILADANLDKVLSAYNKHRDKPIREQAENIIHLFTLTNLGAPAAFKYFDTTIDRKRYTSTKEVLDATLIHQSITGLYETRIDLSQLGGD

SEQ ID NO: 1316 - protein, 1554 aa, synthetic construct
MDKKYSIGLAIGTNSVGWAVITDEYKVPSKKFKVLGNTDRHSIKKNLIGALLFDSGETAEATRLKRTARRRYTRRKNRICYLQEIFSNEMAKVDDSFFHRLEESFLVEEDKKHERHPIFGNIVDEVAYHEKYPTIYHLRKKLVDSTDKADLRLIYLALAHMIKFRGHFLIEGDLNPDNSDVDKLFIQLVQTYNQLFEENPINASGVDAKAILSARLSKSRRLENLIAQLPGEKKNGLFGNLIALSLGLTPNFKSNFDLAEDAKLQLSKDTYDDDLDNLLAQIGDQYADLFLAAKNLSDAILLSDILRVNTEITKAPLSASMIKRYDEHHQDLTLLKALVRQQLPEKYKEIFFDQSKNGYAGYIDGGASQEEFYKFIKPILEKMDGTEELLVKLNREDLLRKQRTFDNGSIPHQIHLGELHAILRRQEDFYPFLKDNREKIEKILTFRIPYYVGPLARGNSRFAWMTRKSEETITPWNFEEVVDKGASAQSFIERMTNFDKNLPNEKVLPKHSLLYEYFTVYNELTKVKYVTEGMRKPAFLSGEQKKAIVDLLFKTNRKVTVKQLKEDYFKKIECFDSVEISGVEDRFNASLGTYHDLLKIIKDKDFLDNEENEDILEDIVLTLTLFEDREMIEERLKTYAHLFDDKVMKQLKRRRYTGWGRLSRKLINGIRDKQSGKTILDFLKSDGFANRNFMQLIHDDSLTFKEDIQKAQVSGQGDSLHEHIANLAGSPAIKKGILQTVKVVDELVKVMGRHKPENIVIEMARENQTTQKGQKNSRERMKRIEEGIKELGSQILKEHPVENTQLQNEKLYLYYLQNGRDMYVDQELDINRLSDYDVDHIVPQSFLKDDSIDNKVLTRSDKNRGKSDNVPSEEVVKKMKNYWRQLLNAKLITQRKFDNLTKAERGGLSELDKAGFIKRQLVETRQITKHVAQILDSRMNTKYDENDKLIREVKVITLKSKLVSDFRKDFQFYKVREINNYHHAHDAYLNAVVGTALIKKYPKLESEFVYGDYKVYDVRKMIGSSGSETPGTSESATPESSGSEVEFSHEYWMRHALTLAKRARDEREVPVGAVLVLNNRVIGEGWNRAIGLHDPTAHAEIMALRQGGLVMQNYRLIDATLYVTFEPCVMCAGAMIHSRIGRVVFGVRNAKTGAAGSLMDVLHYPGMNHRVEITEGILADECAALLCYFFRMPRQVFNAQKKAQSSTDAKSEQEIGKATAKYFFYSNIMNFFKTEITLANGEIRKRPLIETNGETGEIVWDKGRDFATVRKVLSMPQVNIVKKTEVQTGGFSKESILPKRNSDKLIARKKDWDPKKYGGFDSPTVAYSVLVVAKVEKGKSKKLKSVKELLGITIMERSSFEKNPIDFLEAKGYKEVKKDLIIKLPKYSLFELENGRKRMLASAGELQKGNELALPSKYVNFLYLASHYEKLKGSPEDNEQKQLFVEQHKHYLDEIIEQISEFSKRVILADANLDKVLSAYNKHRDKPIREQAENIIHLFTLTNLGAPAAFKYFDTTIDRKRYTSTKEVLDATLIHQSITGLYETRIDLSQLGGD

SEQ ID NO: 1317 - protein, 1554 aa, synthetic construct
MDKKYSIGLAIGTNSVGWAVITDEYKVPSKKFKVLGNTDRHSIKKNLIGALLFDSGETAEATRLKRTARRRYTRRKNRICYLQEIFSNEMAKVDDSFFHRLEESFLVEEDKKHERHPIFGNIVDEVAYHEKYPTIYHLRKKLVDSTDKADLRLIYLALAHMIKFRGHFLIEGDLNPDNSDVDKLFIQLVQTYNQLFEENPINASGVDAKAILSARLSKSRRLENLIAQLPGEKKNGLFGNLIALSLGLTPNFKSNFDLAEDAKLQLSKDTYDDDLDNLLAQIGDQYADLFLAAKNLSDAILLSDILRVNTEITKAPLSASMIKRYDEHHQDLTLLKALVRQQLPEKYKEIFFDQSKNGYAGYIDGGASQEEFYKFIKPILEKMDGTEELLVKLNREDLLRKQRTFDNGSIPHQIHLGELHAILRRQEDFYPFLKDNREKIEKILTFRIPYYVGPLARGNSRFAWMTRKSEETITPWNFEEVVDKGASAQSFIERMTNFDKNLPNEKVLPKHSLLYEYFTVYNELTKVKYVTEGMRKPAFLSGEQKKAIVDLLFKTNRKVTVKQLKEDYFKKIECFDSVEISGVEDRFNASLGTYHDLLKIIKDKDFLDNEENEDILEDIVLTLTLFEDREMIEERLKTYAHLFDDKVMKQLKRRRYTGWGRLSRKLINGIRDKQSGKTILDFLKSDGFANRNFMQLIHDDSLTFKEDIQKAQVSGQGDSLHEHIANLAGSPAIKKGILQTVKVVDELVKVMGRHKPENIVIEMARENQTTQKGQKNSRERMKRIEEGIKELGSQILKEHPVENTQLQNEKLYLYYLQNGRDMYVDQELDINRLSDYDVDHIVPQSFLKDDSIDNKVLTRSDKNRGKSDNVPSEEVVKKMKNYWRQLLNAKLITQRKFDNLTKAERGGLSELDKAGFIKRQLVETRQITKHVAQILDSRMNTKYDENDKLIREVKVITLKSKLVSDFRKDFQFYKVREINNYHHAHDAYLNAVVGTALIKKYPKLESEFVYGDYKVYDVRKMIAKSEQEIGSSGSETPGTSESATPESSGSEVEFSHEYWMRHALTLAKRARDEREVPVGAVLVLNNRVIGEGWNRAIGLHDPTAHAEIMALRQGGLVMQNYRLIDATLYVTFEPCVMCAGAMIHSRIGRVVFGVRNAKTGAAGSLMDVLHYPGMNHRVEITEGILADECAALLCYFFRMPRQVFNAQKKAQSSTDGKATAKYFFYSNIMNFFKTEITLANGEIRKRPLIETNGETGEIVWDKGRDFATVRKVLSMPQVNIVKKTEVQTGGFSKESILPKRNSDKLIARKKDWDPKKYGGFDSPTVAYSVLVVAKVEKGKSKKLKSVKELLGITIMERSSFEKNPIDFLEAKGYKEVKKDLIIKLPKYSLFELENGRKRMLASAGELQKGNELALPSKYVNFLYLASHYEKLKGSPEDNEQKQLFVEQHKHYLDEIIEQISEFSKRVILADANLDKVLSAYNKHRDKPIREQAENIIHLFTLTNLGAPAAFKYFDTTIDRKRYTSTKEVLDATLIHQSITGLYETRIDLSQLGGD

SEQ ID NO: 1318 - protein, 1554 aa, synthetic construct
MDKKYSIGLAIGTNSVGWAVITDEYKVPSKKFKVLGNTDRHSIKKNLIGALLFDSGETAEATRLKRTARRRYTRRKNRICYLQEIFSNEMAKVDDSFFHRLEESFLVEEDKKHERHPIFGNIVDEVAYHEKYPTIYHLRKKLVDSTDKADLRLIYLALAHMIKFRGHFLIEGDLNPDNSDVDKLFIQLVQTYNQLFEENPINASGVDAKAILSARLSKSRRLENLIAQLPGEKKNGLFGNLIALSLGLTPNFKSNFDLAEDAKLQLSKDTYDDDLDNLLAQIGDQYADLFLAAKNLSDAILLSDILRVNTEITKAPLSASMIKRYDEHHQDLTLLKALVRQQLPEKYKEIFFDQSKNGYAGYIDGGASQEEFYKFIKPILEKMDGTEELLVKLNREDLLRKQRTFDNGSIPHQIHLGELHAILRRQEDFYPFLKDNREKIEKILTFRIPYYVGPLARGNSRFAWMTRKSEETITPWNFEEVVDKGASAQSFIERMTNFDKNLPNEKVLPKHSLLYEYFTVYNELTKVKYVTEGMRKPAFLSGEQKKAIVDLLFKTNRKVTVKQLKEDYFKKIECFDSVEISGVEDRFNASLGTYHDLLKIIKDKDFLDNEENEDILEDIVLTLTLFEDREMIEERLKTYAHLFDDKVMKQLKRRRYTGWGRLSRKLINGIRDKQSGKTILDFLKSDGFANRNFMQLIHDDSLTFKEDIQKAQVSGQGDSLHEHIANLAGSPAIKKGILQTVKVVDELVKVMGRHKPENIVIEMARENQTTQKGQKNSRERMKRIEEGIKELGSQILKEHPVENTQLQNEKLYLYYLQNGRDMYVDQELDINRLSDYDVDHIVPQSFLKDDSIDNKVLTRSDKNRGKSDNVPSEEVVKKMKNYWRQLLNAKLITQRKFDNLTKAERGGLSELDKAGFIKRQLVETRQITKHVAQILDSRMNTKYDENDKLIREVKVITLKSKLVSDFRKDFQFYKVREINNYHHAHDAYLNAVVGTALIKKYPKLESEFVYGDYKVYDVRKMIAKSEQEIGKATAKYFFYSGSSGSETPGTSESATPESSGSEVEFSHEYWMRHALTLAKRARDEREVPVGAVLVLNNRVIGEGWNRAIGLHDPTAHAEIMALRQGGLVMQNYRLIDATLYVTFEPCVMCAGAMIHSRIGRVVFGVRNAKTGAAGSLMDVLHYPGMNHRVEITEGILADECAALLCYFFRMPRQVFNAQKKAQSSTDNIMNFFKTEITLANGEIRKRPLIETNGETGEIVWDKGRDFATVRKVLSMPQVNIVKKTEVQTGGFSKESILPKRNSDKLIARKKDWDPKKYGGFDSPTVAYSVLVVAKVEKGKSKKLKSVKELLGITIMERSSFEKNPIDFLEAKGYKEVKKDLIIKLPKYSLFELENGRKRMLASAGELQKGNELALPSKYVNFLYLASHYEKLKGSPEDNEQKQLFVEQHKHYLDEIIEQISEFSKRVILADANLDKVLSAYNKHRDKPIREQAENIIHLFTLTNLGAPAAFKYFDTTIDRKRYTSTKEVLDATLIHQSITGLYETRIDLSQLGGD

SEQ ID NO: 1319 - protein, 1554 aa, synthetic construct
MDKKYSIGLAIGTNSVGWAVITDEYKVPSKKFKVLGNTDRHSIKKNLIGALLFDSGETAEATRLKRTARRRYTRRKNRICYLQEIFSNEMAKVDDSFFHRLEESFLVEEDKKHERHPIFGNIVDEVAYHEKYPTIYHLRKKLVDSTDKADLRLIYLALAHMIKFRGHFLIEGDLNPDNSDVDKLFIQLVQTYNQLFEENPINASGVDAKAILSARLSKSRRLENLIAQLPGEKKNGLFGNLIALSLGLTPNFKSNFDLAEDAKLQLSKDTYDDDLDNLLAQIGDQYADLFLAAKNLSDAILLSDILRVNTEITKAPLSASMIKRYDEHHQDLTLLKALVRQQLPEKYKEIFFDQSKNGYAGYIDGGASQEEFYKFIKPILEKMDGTEELLVKLNREDLLRKQRTFDNGSIPHQIHLGELHAILRRQEDFYPFLKDNREKIEKILTFRIPYYVGPLARGNSRFAWMTRKSEETITPWNFEEVVDKGASAQSFIERMTNFDKNLPNEKVLPKHSLLYEYFTVYNELTKVKYVTEGMRKPAFLSGEQKKAIVDLLFKTNRKVTVKQLKEDYFKKIECFDSVEISGVEDRFNASLGTYHDLLKIIKDKDFLDNEENEDILEDIVLTLTLFEDREMIEERLKTYAHLFDDKVMKQLKRRRYTGWGRLSRKLINGIRDKQSGKTILDFLKSDGFANRNFMQLIHDDSLTFKEDIQKAQVSGQGDSLHEHIANLAGSPAIKKGILQTVKVVDELVKVMGRHKPENIVIEMARENQTTQKGQKNSRERMKRIEEGIKELGSQILKEHPVENTQLQNEKLYLYYLQNGRDMYVDQELDINRLSDYDVDHIVPQSFLKDDSIDNKVLTRSDKNRGKSDNVPSEEVVKKMKNYWRQLLNAKLITQRKFDNLTKAERGGLSELDKAGFIKRQLVETRQITKHVAQILDSRMNTKYDENDKLIREVKVITLKSKLVSDFRKDFQFYKVREINNYHHAHDAYLNAVVGTALIKKYPKLESEFVYGDYKVYDVRKMIAKSEQEIGKATAKYFFYSNIMNFFKTEITLANGEIRKRPLIETNGEGSSGSETPGTSESATPESSGSEVEFSHEYWMRHALTLAKRARDEREVPVGAVLVLNNRVIGEGWNRAIGLHDPTAHAEIMALRQGGLVMQNYRLIDATLYVTFEPCVMCAGAMIHSRIGRVVFGVRNAKTGAAGSLMDVLHYPGMNHRVEITEGILADECAALLCYFFRMPRQVFNAQKKAQSSTDTGEIVWDKGRDFATVRKVLSMPQVNIVKKTEVQTGGFSKESILPKRNSDKLIARKKDWDPKKYGGFDSPTVAYSVLVVAKVEKGKSKKLKSVKELLGITIMERSSFEKNPIDFLEAKGYKEVKKDLIIKLPKYSLFELENGRKRMLASAGELQKGNELALPSKYVNFLYLASHYEKLKGSPEDNEQKQLFVEQHKHYLDEIIEQISEFSKRVILADANLDKVLSAYNKHRDKPIREQAENIIHLFTLTNLGAPAAFKYFDTTIDRKRYTSTKEVLDATLIHQSITGLYETRIDLSQLGGD

SEQ ID NO: 1320 - protein, 1554 aa, synthetic construct
MDKKYSIGLAIGTNSVGWAVITDEYKVPSKKFKVLGNTDRHSIKKNLIGALLFDSGETAEATRLKRTARRRYTRRKNRICYLQEIFSNEMAKVDDSFFHRLEESFLVEEDKKHERHPIFGNIVDEVAYHEKYPTIYHLRKKLVDSTDKADLRLIYLALAHMIKFRGHFLIEGDLNPDNSDVDKLFIQLVQTYNQLFEENPINASGVDAKAILSARLSKSRRLENLIAQLPGEKKNGLFGNLIALSLGLTPNFKSNFDLAEDAKLQLSKDTYDDDLDNLLAQIGDQYADLFLAAKNLSDAILLSDILRVNTEITKAPLSASMIKRYDEHHQDLTLLKALVRQQLPEKYKEIFFDQSKNGYAGYIDGGASQEEFYKFIKPILEKMDGTEELLVKLNREDLLRKQRTFDNGSIPHQIHLGELHAILRRQEDFYPFLKDNREKIEKILTFRIPYYVGPLARGNSRFAWMTRKSEETITPWNFEEVVDKGASAQSFIERMTNFDKNLPNEKVLPKHSLLYEYFTVYNELTKVKYVTEGMRKPAFLSGEQKKAIVDLLFKTNRKVTVKQLKEDYFKKIECFDSVEISGVEDRFNASLGTYHDLLKIIKDKDFLDNEENEDILEDIVLTLTLFEDREMIEERLKTYAHLFDDKVMKQLKRRRYTGWGRLSRKLINGIRDKQSGKTILDFLKSDGFANRNFMQLIHDDSLTFKEDIQKAQVSGQGDSLHEHIANLAGSPAIKKGILQTVKVVDELVKVMGRHKPENIVIEMARENQTTQKGQKNSRERMKRIEEGIKELGSQILKEHPVENTQLQNEKLYLYYLQNGRDMYVDQELDINRLSDYDVDHIVPQSFLKDDSIDNKVLTRSDKNRGKSDNVPSEEVVKKMKNYWRQLLNAKLITQRKFDNLTKAERGGLSELDKAGFIKRQLVETRQITKHVAQILDSRMNTKYDENDKLIREVKVITLKSKLVSDFRKDFQFYKVREINNYHHAHDAYLNAVVGTALIKKYPKLESEFVYGDYKVYDVRKMIAKSEQEIGKATAKYFFYSNIMNFFKTEITLANGEIRKRPLIETNGETGEIVWDKGRDFATVRKVLSMPQVNIVKKTEVQTGGFSKESILPKRNSDKLIARKKDWDPKKYGGFDSPTVAYSVLVVAKVEKGKSKKLKSVKELLGITIMERSSFEKNPIDFLEAKGYKEVKKDLIIKLPKYSLFELENGRKRMLASAGELQKGNELALPSKYVNFLYLASHYEKLKGGSSGSETPGTSESATPESSGSEVEFSHEYWMRHALTLAKRARDEREVPVGAVLVLNNRVIGEGWNRAIGLHDPTAHAEIMALRQGGLVMQNYRLIDATLYVTFEPCVMCAGAMIHSRIGRVVFGVRNAKTGAAGSLMDVLHYPGMNHRVEITEGILADECAALLCYFFRMPRQVFNAQKKAQSSTDSPEDNEQKQLFVEQHKHYLDEIIEQISEFSKRVILADANLDKVLSAYNKHRDKPIREQAENIIHLFTLTNLGAPAAFKYFDTTIDRKRYTSTKEVLDATLIHQSITGLYETRIDLSQLGGD

SEQ ID NO: 1321 - protein, 1554 aa, synthetic construct
MDKKYSIGLAIGTNSVGWAVITDEYKVPSKKFKVLGNTDRHSIKKNLIGALLFDSGETAEATRLKRTARRRYTRRKNRICYLQEIFSNEMAKVDDSFFHRLEESFLVEEDKKHERHPIFGNIVDEVAYHEKYPTIYHLRKKLVDSTDKADLRLIYLALAHMIKFRGHFLIEGDLNPDNSDVDKLFIQLVQTYNQLFEENPINASGVDAKAILSARLSKSRRLENLIAQLPGEKKNGLFGNLIALSLGLTPNFKSNFDLAEDAKLQLSKDTYDDDLDNLLAQIGDQYADLFLAAKNLSDAILLSDILRVNTEITKAPLSASMIKRYDEHHQDLTLLKALVRQQLPEKYKEIFFDQSKNGYAGYIDGGASQEEFYKFIKPILEKMDGTEELLVKLNREDLLRKQRTFDNGSIPHQIHLGELHAILRRQEDFYPFLKDNREKIEKILTFRIPYYVGPLARGNSRFAWMTRKSEETITPWNFEEVVDKGASAQSFIERMTNFDKNLPNEKVLPKHSLLYEYFTVYNELTKVKYVTEGMRKPAFLSGEQKKAIVDLLFKTNRKVTVKQLKEDYFKKIECFDSVEISGVEDRFNASLGTYHDLLKIIKDKDFLDNEENEDILEDIVLTLTLFEDREMIEERLKTYAHLFDDKVMKQLKRRRYTGWGRLSRKLINGIRDKQSGKTILDFLKSDGFANRNFMQLIHDDSLTFKEDIQKAQVSGQGDSLHEHIANLAGSPAIKKGILQTVKVVDELVKVMGRHKPENIVIEMARENQTTQKGQKNSRERMKRIEEGIKELGSQILKEHPVENTQLQNEKLYLYYLQNGRDMYVDQELDINRLSDYDVDHIVPQSFLKDDSIDNKVLTRSDKNRGKSDNVPSEEVVKKMKNYWRQLLNAKLITQRKFDNLTKAERGGLSELDKAGFIKRQLVETRQITKHVAQILDSRMNTKYDENDKLIREVKVITLKSKLVSDFRKDFQFYKVREINNYHHAHDAYLNAVVGTALIKKYPKLESEFVYGDYKVYDVRKMIAKSEQEIGKATAKYFFYSNIMNFFKTEITLANGSSGSETPGTSESATPESSGSEVEFSHEYWMRHALTLAKRARDEREVPVGAVLVLNNRVIGEGWNRAIGLHDPTAHAEIMALRQGGLVMQNYRLIDATLYVTFEPCVMCAGAMIHSRIGRVVFGVRNAKTGAAGSLMDVLHYPGMNHRVEITEGILADECAALLCYFFRMPRQVFNAQKKAQSSTDGEIRKRPLIETNGETGEIVWDKGRDFATVRKVLSMPQVNIVKKTEVQTGGFSKESILPKRNSDKLIARKKDWDPKKYGGFDSPTVAYSVLVVAKVEKGKSKKLKSVKELLGITIMERSSFEKNPIDFLEAKGYKEVKKDLIIKLPKYSLFELENGRKRMLASAGELQKGNELALPSKYVNFLYLASHYEKLKGSPEDNEQKQLFVEQHKHYLDEIIEQISEFSKRVILADANLDKVLSAYNKHRDKPIREQAENIIHLFTLTNLGAPAAFKYFDTTIDRKRYTSTKEVLDATLIHQSITGLYETRIDLSQLGGD

SEQ ID NO: 1322 - protein, 1554 aa, synthetic construct
MDKKYSIGLAIGTNSVGWAVITDEYKVPSKKFKVLGNTDRHSIKKNLIGALLFDSGETAEATRLKRTARRRYTRRKNRICYLQEIFSNEMAKVDDSFFHRLEESFLVEEDKKHERHPIFGNIVDEVAYHEKYPTIYHLRKKLVDSTDKADLRLIYLALAHMIKFRGHFLIEGDLNPDNSDVDKLFIQLVQTYNQLFEENPINASGVDAKAILSARLSKSRRLENLIAQLPGEKKNGLFGNLIALSLGLTPNFKSNFDLAEDAKLQLSKDTYDDDLDNLLAQIGDQYADLFLAAKNLSDAILLSDILRVNTEITKAPLSASMIKRYDEHHQDLTLLKALVRQQLPEKYKEIFFDQSKNGYAGYIDGGASQEEFYKFIKPILEKMDGTEELLVKLNREDLLRKQRTFDNGSIPHQIHLGELHAILRRQEDFYPFLKDNREKIEKILTFRIPYYVGPLARGNSRFAWMTRKSEETITPWNFEEVVDKGASAQSFIERMTNFDKNLPNEKVLPKHSLLYEYFTVYNELTKVKYVTEGMRKPAFLSGEQKKAIVDLLFKTNRKVTVKQLKEDYFKKIECFDSVEISGVEDRFNASLGTYHDLLKIIKDKDFLDNEENEDILEDIVLTLTLFEDREMIEERLKTYAHLFDDKVMKQLKRRRYTGWGRLSRKLINGIRDKQSGKTILDFLKSDGFANRNFMQLIHDDSLTFKEDIQKAQVSGQGDSLHEHIANLAGSPAIKKGILQTVKVVDELVKVMGRHKPENIVIEMARENQTTQKGQKNSRERMKRIEEGIKELGSQILKEHPVENTQLQNEKLYLYYLQNGRDMYVDQELDINRLSDYDVDHIVPQSFLKDDSIDNKVLTRSDKNRGKSDNVPSEEVVKKMKNYWRQLLNAKLITQRKFDNLTKAERGGLSELDKAGFIKRQLVETRQITKHVAQILDSRMNTKYDENDKLIREVKVITLKSKLVSDFRKDFQFYKVREINNYHHAHDAYLNAVVGTALIKKYPKLESEFVYGDYKVYDVRKMIAKSEGSSGSETPGTSESATPESSGSEVEFSHEYWMRHALTLAKRARDEREVPVGAVLVLNNRVIGEGWNRAIGLHDPTAHAEIMALRQGGLVMQNYRLIDATLYVTFEPCVMCAGAMIHSRIGRVVFGVRNAKTGAAGSLMDVLHYPGMNHRVEITEGILADECAALLCYFFRMPRQVFNAQKKAQSSTDQEIGKATAKYFFYSNIMNFFKTEITLANGEIRKRPLIETNGETGEIVWDKGRDFATVRKVLSMPQVNIVKKTEVQTGGFSKESILPKRNSDKLIARKKDWDPKKYGGFDSPTVAYSVLVVAKVEKGKSKKLKSVKELLGITIMERSSFEKNPIDFLEAKGYKEVKKDLIIKLPKYSLFELENGRKRMLASAGELQKGNELALPSKYVNFLYLASHYEKLKGSPEDNEQKQLFVEQHKHYLDEIIEQISEFSKRVILADANLDKVLSAYNKHRDKPIREQAENIIHLFTLTNLGAPAAFKYFDTTIDRKRYTSTKEVLDATLIHQSITGLYETRIDLSQLGGD

SEQ ID NO: 1323 - protein, 1540 aa, synthetic construct
MDKKYSIGLAIGTNSVGWAVITDEYKVPSKKFKVLGNTDRHSIKKNLIGALLFDSGETAEATRLKRTARRRYTRRKNRICYLQEIFSNEMAKVDDSFFHRLEESFLVEEDKKHERHPIFGNIVDEVAYHEKYPTIYHLRKKLVDSTDKADLRLIYLALAHMIKFRGHFLIEGDLNPDNSDVDKLFIQLVQTYNQLFEENPINASGVDAKAILSARLSKSRRLENLIAQLPGEKKNGLFGNLIALSLGLTPNFKSNFDLAEDAKLQLSKDTYDDDLDNLLAQIGDQYADLFLAAKNLSDAILLSDILRVNTEITKAPLSASMIKRYDEHHQDLTLLKALVRQQLPEKYKEIFFDQSKNGYAGYIDGGASQEEFYKFIKPILEKMDGTEELLVKLNREDLLRKQRTFDNGSIPHQIHLGELHAILRRQEDFYPFLKDNREKIEKILTFRIPYYVGPLARGNSRFAWMTRKSEETITPWNFEEVVDKGASAQSFIERMTNFDKNLPNEKVLPKHSLLYEYFTVYNELTKVKYVTEGMRKPAFLSGEQKKAIVDLLFKTNRKVTVKQLKEDYFKKIECFDSVEISGVEDRFNASLGTYHDLLKIIKDKDFLDNEENEDILEDIVLTLTLFEDREMIEERLKTYAHLFDDKVMKQLKRRRYTGWGRLSRKLINGIRDKQSGKTILDFLKSDGFANRNFMQLIHDDSLTFKEDIQKAQVSGQGDSLHEHIANLAGSPAIKKGILQTVKVVDELVKVMGRHKPENIVIEMARENQGSSGSETPGTSESATPESSGSEVEFSHEYWMRHALTLAKRARDEREVPVGAVLVLNNRVIGEGWNRAIGLHDPTAHAEIMALRQGGLVMQNYRLIDATLYVTFEPCVMCAGAMIHSRIGRVVFGVRNAKTGAAGSLMDVLHYPGMNHRVEITEGILADECAALLCYFFRMPRTTQKGQKNSRERMKRIEEGIKELGSQILKEHPVENTQLQNEKLYLYYLQNGRDMYVDQELDINRLSDYDVDHIVPQSFLKDDSIDNKVLTRSDKNRGKSDNVPSEEVVKKMKNYWRQLLNAKLITQRKFDNLTKAERGGLSELDKAGFIKRQLVETRQITKHVAQILDSRMNTKYDENDKLIREVKVITLKSKLVSDFRKDFQFYKVREINNYHHAHDAYLNAVVGTALIKKYPKLESEFVYGDYKVYDVRKMIAKSEQEIGKATAKYFFYSNIMNFFKTEITLANGEIRKRPLIETNGETGEIVWDKGRDFATVRKVLSMPQVNIVKKTEVQTGGFSKESILPKRNSDKLIARKKDWDPKKYGGFDSPTVAYSVLVVAKVEKGKSKKLKSVKELLGITIMERSSFEKNPIDFLEAKGYKEVKKDLIIKLPKYSLFELENGRKRMLASAGELQKGNELALPSKYVNFLYLASHYEKLKGSPEDNEQKQLFVEQHKHYLDEIIEQISEFSKRVILADANLDKVLSAYNKHRDKPIREQAENIIHLFTLTNLGAPAAFKYFDTTIDRKRYTSTKEVLDATLIHQSITGLYETRIDLSQLGGD

SEQ ID NO: 1324 - protein, 1540 aa, synthetic construct
MDKKYSIGLAIGTNSVGWAVITDEYKVPSKKFKVLGNTDRHSIKKNLIGALLFDSGETAEATRLKRTARRRYTRRKNRICYLQEIFSNEMAKVDDSFFHRLEESFLVEEDKKHERHPIFGNIVDEVAYHEKYPTIYHLRKKLVDSTDKADLRLIYLALAHMIKFRGHFLIEGDLNPDNSDVDKLFIQLVQTYNQLFEENPINASGVDAKAILSARLSKSRRLENLIAQLPGEKKNGLFGNLIALSLGLTPNFKSNFDLAEDAKLQLSKDTYDDDLDNLLAQIGDQYADLFLAAKNLSDAILLSDILRVNTEITKAPLSASMIKRYDEHHQDLTLLKALVRQQLPEKYKEIFFDQSKNGYAGYIDGGASQEEFYKFIKPILEKMDGTEELLVKLNREDLLRKQRTFDNGSIPHQIHLGELHAILRRQEDFYPFLKDNREKIEKILTFRIPYYVGPLARGNSRFAWMTRKSEETITPWNFEEVVDKGASAQSFIERMTNFDKNLPNEKVLPKHSLLYEYFTVYNELTKVKYVTEGMRKPAFLSGEQKKAIVDLLFKTNRKVTVKQLKEDYFKKIECFDSVEISGVEDRFNASLGTYHDLLKIIKDKDFLDNEENEDILEDIVLTLTLFEDREMIEERLKTYAHLFDDKVMKQLKRRRYTGWGRLSRKLINGIRDKQSGKTILDFLKSDGFANRNFMQLIHDDSLTFKEDIQKAQVSGQGDSLHEHIANLAGSPAIKKGILQTVKVVDELVKVMGRHKPENIVIEMARENQTTQKGQKNSRERMKRIEEGIKELGSQILKEHPVENTQLQNEKLYLYYLQNGRDMYVDQELDINRLSDYDVDHIVPQSFLKDDSIDNKVLTRSDKNRGKSDNVPSEEVVKKMKNYWRQLLNAKLITQRKFDNLTKAERGGLSELDKAGFIKRQLVETRQITKHVAQILDSRMNTKYDENDKLIREVKVITLKSKLVSDFRKDFQFYKVREINNYHHAHDAYLNAVVGTALIKKYPKLESEFVYGDYKVYDVRKMIAKSEQEIGKATAKYFFYSNIMNFFKTEITLANGEIRKRPLIETNGETGEIVWDKGRDFATVRKVLSMPQVNIVKKTEVQTGGFSKESILPKRNSDKLIARKKDWDPKKYGGFDSPTVAYSVLVVAKVEKGKSKKLKSVKELLGITIMERSSFEKNPIDFLEAKGYKEVKKDLIIKLPKYSLFELENGRKRMLASAGELQKGNELALPSKYVNFLYLASHYEKLKGSPGSSGSETPGTSESATPESSGSEVEFSHEYWMRHALTLAKRARDEREVPVGAVLVLNNRVIGEGWNRAIGLHDPTAHAEIMALRQGGLVMQNYRLIDATLYVTFEPCVMCAGAMIHSRIGRVVFGVRNAKTGAAGSLMDVLHYPGMNHRVEITEGILADECAALLCYFFRMPREDNEQKQLFVEQHKHYLDEIIEQISEFSKRVILADANLDKVLSAYNKHRDKPIREQAENIIHLFTLTNLGAPAAFKYFDTTIDRKRYTSTKEVLDATLIHQSITGLYETRIDLSQLGGD

SEQ ID NO: 1325 - protein, 1543 aa, synthetic construct
MDKKYSIGLAIGTNSVGWAVITDEYKVPSKKFKVLGNTDRHSIKKNLIGALLFDSGETAEATRLKRTARRRYTRRKNRICYLQEIFSNEMAKVDDSFFHRLEESFLVEEDKKHERHPIFGNIVDEVAYHEKYPTIYHLRKKLVDSTDKADLRLIYLALAHMIKFRGHFLIEGDLNPDNSDVDKLFIQLVQTYNQLFEENPINASGVDAKAILSARLSKSRRLENLIAQLPGEKKNGLFGNLIALSLGLTPNFKSNFDLAEDAKLQLSKDTYDDDLDNLLAQIGDQYADLFLAAKNLSDAILLSDILRVNTEITKAPLSASMIKRYDEHHQDLTLLKALVRQQLPEKYKEIFFDQSKNGYAGYIDGGASQEEFYKFIKPILEKMDGTEELLVKLNREDLLRKQRTFDNGSIPHQIHLGELHAILRRQEDFYPFLKDNREKIEKILTFRIPYYVGPLARGNSRFAWMTRKSEETITPWNFEEVVDKGASAQSFIERMTNFDKNLPNEKVLPKHSLLYEYFTVYNELTKVKYVTEGMRKPAFLSGEQKKAIVDLLFKTNRKVTVKQLKEDYFKKIECFDSVEISGVEDRFNASLGTYHDLLKIIKDKDFLDNEENEDILEDIVLTLTLFEDREMIEERLKTYAHLFDDKVMKQLKRRRYTGWGRLSRKLINGIRDKQSGKTILDFLKSDGFANRNFMQLIHDDSLTFKEDIQKAQVSGQGDSLHEHIANLAGSPAIKKGILQTVKVVDELVKVMGRHKPENIVIEMARENQTTQKGQKNSRERMKRIEEGIKELGSQILKEHPVENTQLQNEKLYLYYLQNGRDMYVDQELDINRLSDYDVDHIVPQSFLKDDSIDNKVLTRSDKNRGKSDNVPSEEVVKKMKNYWRQLLNAKLITQRKFDNLTKAERGGLSELDKAGFIKRQLVETRQITKHVAQILDSRMNTKYDENDKLIREVKVITLKSKLVSDFRKDFQFYKVREINNYHHAHDAYLNAVVGTALIKKYPKLESEFVYGDYKVYDVRKMIAKSEQEIGKATAKYFFYSNIMNFFKTEITLANGEIRKRPLIETNGETGEIVWDKGRDFATVRKVLSMPQVNIVKKTEVQTGGFSKESILPKRNSDKLIARKKDWDPKKYGGFDSPTVAYSVLVVAKVEKGKSKKLKSVKELLGITIMERSSFEKNPIDFLEAKGYKEVKKDLIIKLPKYSLFELENGRKRMLASAGELQKGNELALPSKYVNFLYLASHYEKLKGSPGSSGSSGSETPGTSESATPESSGSEVEFSHEYWMRHALTLAKRARDEREVPVGAVLVLNNRVIGEGWNRAIGLHDPTAHAEIMALRQGGLVMQNYRLIDATLYVTFEPCVMCAGAMIHSRIGRVVFGVRNAKTGAAGSLMDVLHYPGMNHRVEITEGILADECAALLCYFFRMPREDNEQKQLFVEQHKHYLDEIIEQISEFSKRVILADANLDKVLSAYNKHRDKPIREQAENIIHLFTLTNLGAPAAFKYFDTTIDRKRYTSTKEVLDATLIHQSITGLYETRIDLSQLGGD

SEQ ID NO: 1326 - protein, 1546 aa, synthetic construct
MDKKYSIGLAIGTNSVGWAVITDEYKVPSKKFKVLGNTDRHSIKKNLIGALLFDSGETAEATRLKRTARRRYTRRKNRICYLQEIFSNEMAKVDDSFFHRLEESFLVEEDKKHERHPIFGNIVDEVAYHEKYPTIYHLRKKLVDSTDKADLRLIYLALAHMIKFRGHFLIEGDLNPDNSDVDKLFIQLVQTYNQLFEENPINASGVDAKAILSARLSKSRRLENLIAQLPGEKKNGLFGNLIALSLGLTPNFKSNFDLAEDAKLQLSKDTYDDDLDNLLAQIGDQYADLFLAAKNLSDAILLSDILRVNTEITKAPLSASMIKRYDEHHQDLTLLKALVRQQLPEKYKEIFFDQSKNGYAGYIDGGASQEEFYKFIKPILEKMDGTEELLVKLNREDLLRKQRTFDNGSIPHQIHLGELHAILRRQEDFYPFLKDNREKIEKILTFRIPYYVGPLARGNSRFAWMTRKSEETITPWNFEEVVDKGASAQSFIERMTNFDKNLPNEKVLPKHSLLYEYFTVYNELTKVKYVTEGMRKPAFLSGEQKKAIVDLLFKTNRKVTVKQLKEDYFKKIECFDSVEISGVEDRFNASLGTYHDLLKIIKDKDFLDNEENEDILEDIVLTLTLFEDREMIEERLKTYAHLFDDKVMKQLKRRRYTGWGRLSRKLINGIRDKQSGKTILDFLKSDGFANRNFMQLIHDDSLTFKEDIQKAQVSGQGDSLHEHIANLAGSPAIKKGILQTVKVVDELVKVMGRHKPENIVIEMARENQTTQKGQKNSRERMKRIEEGIKELGSQILKEHPVENTQLQNEKLYLYYLQNGRDMYVDQELDINRLSDYDVDHIVPQSFLKDDSIDNKVLTRSDKNRGKSDNVPSEEVVKKMKNYWRQLLNAKLITQRKFDNLTKAERGGLSELDKAGFIKRQLVETRQITKHVAQILDSRMNTKYDENDKLIREVKVITLKSKLVSDFRKDFQFYKVREINNYHHAHDAYLNAVVGTALIKKYPKLESEFVYGDYKVYDVRKMIAKSEQEIGKATAKYFFYSNIMNFFKTEITLANGEIRKRPLIETNGETGEIVWDKGRDFATVRKVLSMPQVNIVKKTEVQTGGFSKESILPKRNSDKLIARKKDWDPKKYGGFDSPTVAYSVLVVAKVEKGKSKKLKSVKELLGITIMERSSFEKNPIDFLEAKGYKEVKKDLIIKLPKYSLFELENGRKRMLASAGELQKGNELALPSKYVNFLYLASHYEKLKGSPGSSGSSGSETPGTSESATPESGSSSGSEVEFSHEYWMRHALTLAKRARDEREVPVGAVLVLNNRVIGEGWNRAIGLHDPTAHAEIMALRQGGLVMQNYRLIDATLYVTFEPCVMCAGAMIHSRIGRVVFGVRNAKTGAAGSLMDVLHYPGMNHRVEITEGILADECAALLCYFFRMPREDNEQKQLFVEQHKHYLDEIIEQISEFSKRVILADANLDKVLSAYNKHRDKPIREQAENIIHLFTLTNLGAPAAFKYFDTTIDRKRYTSTKEVLDATLIHQSITGLYETRIDLSQLGGD

SEQ ID NO: 1327 - protein, 1546 aa, synthetic construct
MDKKYSIGLAIGTNSVGWAVITDEYKVPSKKFKVLGNTDRHSIKKNLIGALLFDSGETAEATRLKRTARRRYTRRKNRICYLQEIFSNEMAKVDDSFFHRLEESFLVEEDKKHERHPIFGNIVDEVAYHEKYPTIYHLRKKLVDSTDKADLRLIYLALAHMIKFRGHFLIEGDLNPDNSDVDKLFIQLVQTYNQLFEENPINASGVDAKAILSARLSKSRRLENLIAQLPGEKKNGLFGNLIALSLGLTPNFKSNFDLAEDAKLQLSKDTYDDDLDNLLAQIGDQYADLFLAAKNLSDAILLSDILRVNTEITKAPLSASMIKRYDEHHQDLTLLKALVRQQLPEKYKEIFFDQSKNGYAGYIDGGASQEEFYKFIKPILEKMDGTEELLVKLNREDLLRKQRTFDNGSIPHQIHLGELHAILRRQEDFYPFLKDNREKIEKILTFRIPYYVGPLARGNSRFAWMTRKSEETITPWNFEEVVDKGASAQSFIERMTNFDKNLPNEKVLPKHSLLYEYFTVYNELTKVKYVTEGMRKPAFLSGEQKKAIVDLLFKTNRKVTVKQLKEDYFKKIECFDSVEISGVEDRFNASLGTYHDLLKIIKDKDFLDNEENEDILEDIVLTLTLFEDREMIEERLKTYAHLFDDKVMKQLKRRRYTGWGRLSRKLINGIRDKQSGKTILDFLKSDGFANRNFMQLIHDDSLTFKEDIQKAQVSGQGDSLHEHIANLAGSPAIKKGILQTVKVVDELVKVMGRHKPENIVIEMARENQTTQKGQKNSRERMKRIEEGIKELGSQILKEHPVENTQLQNEKLYLYYLQNGRDMYVDQELDINRLSDYDVDHIVPQSFLKDDSIDNKVLTRSDKNRGKSDNVPSEEVVKKMKNYWRQLLNAKLITQRKFDNLTKAERGGLSELDKAGFIKRQLVETRQITKHVAQILDSRMNTKYDENDKLIREVKVITLKSKLVSDFRKDFQFYKVREINNYHHAHDAYLNAVVGTALIKKYPKLESEFVYGDYKVYDVRKMIAKSEQEIGKATAKYFFYSNIMNFFKTEITLANGEIRKRPLIETNGETGEIVWDKGRDFATVRKVLSMPQVNIVKKTEVQTGGFSKESILPKRNSDKLIARKKDWDPKKYGGFDSPTVAYSVLVVAKVEKGKSKKLKSVKELLGITIMERSSFEKNPIDFLEAKGYKEVKKDLIIKLPKYSLFELENGRKRMLASAGELQKGNELALPSKYVNFLYLASHYEKLKGSPGSSGSSGSETPGTSESATPESGSSSGSEVEFSHEYWMRHALTLAKRARDEREVPVGAVLVLNNRVIGEGWNRAIGLHDPTAHAEIMALRQGGLVMQNYRLIDATLYVTFEPCVMCAGAMIHSRIGRVVFGVRNAKTGAAGSLMDVLHYPGMNHRVEITEGILADECAALLCYFFRMRREDNEQKQLFVEQHKHYLDEIIEQISEFSKRVILADANLDKVLSAYNKHRDKPIREQAENIIHLFTLTNLGAPAAFKYFDTTIDRKRYTSTKEVLDATLIHQSITGLYETRIDLSQLGGD

SEQ ID NO: 1328 - protein, 1546 aa, synthetic construct
MDKKYSIGLAIGTNSVGWAVITDEYKVPSKKFKVLGNTDRHSIKKNLIGALLFDSGETAEATRLKRTARRRYTRRKNRICYLQEIFSNEMAKVDDSFFHRLEESFLVEEDKKHERHPIFGNIVDEVAYHEKYPTIYHLRKKLVDSTDKADLRLIYLALAHMIKFRGHFLIEGDLNPDNSDVDKLFIQLVQTYNQLFEENPINASGVDAKAILSARLSKSRRLENLIAQLPGEKKNGLFGNLIALSLGLTPNFKSNFDLAEDAKLQLSKDTYDDDLDNLLAQIGDQYADLFLAAKNLSDAILLSDILRVNTEITKAPLSASMIKRYDEHHQDLTLLKALVRQQLPEKYKEIFFDQSKNGYAGYIDGGASQEEFYKFIKPILEKMDGTEELLVKLNREDLLRKQRTFDNGSIPHQIHLGELHAILRRQEDFYPFLKDNREKIEKILTFRIPYYVGPLARGNSRFAWMTRKSEETITPWNFEEVVDKGASAQSFIERMTNFDKNLPNEKVLPKHSLLYEYFTVYNELTKVKYVTEGMRKPAFLSGEQKKAIVDLLFKTNRKVTVKQLKEDYFKKIECFDSVEISGVEDRFNASLGTYHDLLKIIKDKDFLDNEENEDILEDIVLTLTLFEDREMIEERLKTYAHLFDDKVMKQLKRRRYTGWGRLSRKLINGIRDKQSGKTILDFLKSDGFANRNFMQLIHDDSLTFKEDIQKAQVSGQGDSLHEHIANLAGSPAIKKGILQTVKVVDELVKVMGRHKPENIVIEMARENQTTQKGQKNSRERMKRIEEGIKELGSQILKEHPVENTQLQNEKLYLYYLQNGRDMYVDQELDINRLSDYDVDHIVPQSFLKDDSIDNKVLTRSDKNRGKSDNVPSEEVVKKMKNYWRQLLNAKLITQRKFDNLTKAERGGLSELDKAGFIKRQLVETRQITKHVAQILDSRMNTKYDENDKLIREVKVITLKSKLVSDFRKDFQFYKVREINNYHHAHDAYLNAVVGTALIKKYPKLESEFVYGDYKVYDVRKMIAKSEQEIGKATAKYFFYSNIMNFFKTEITLANGEIRKRPLIETNGETGEIVWDKGRDFATVRKVLSMPQVNIVKKTEVQTGGFSKESILPKRNSDKLIARKKDWDPKKYGGFDSPTVAYSVLVVAKVEKGKSKKLKSVKELLGITIMERSSFEKNPIDFLEAKGYKEVKKDLIIKLPKYSLFELENGRKRMLASAGELQKGNELALPSKYVNFLYLASHYEKLKGSGSSGSSGSETPGTSESATPESGSSSGSEVEFSHEYWMRHALTLAKRARDEREVPVGAVLVLNNRVIGEGWNRAIGLHDPTAHAEIMALRQGGLVMQNYRLIDATLYVTFEPCVMCAGAMIHSRIGRVVFGVRNAKTGAAGSLMDVLHYPGMNHRVEITEGILADECAALLCYFFRMRRPEDNEQKQLFVEQHKHYLDEIIEQISEFSKRVILADANLDKVLSAYNKHRDKPIREQAENIIHLFTLTNLGAPAAFKYFDTTIDRKRYTSTKEVLDATLIHQSITGLYETRIDLSQLGGD

SEQ ID NO: 1329 - protein, 1551 aa, synthetic construct
MDKKYSIGLAIGTNSVGWAVITDEYKVPSKKFKVLGNTDRHSIKKNLIGALLFDSGETAEATRLKRTARRRYTRRKNRICYLQEIFSNEMAKVDDSFFHRLEESFLVEEDKKHERHPIFGNIVDEVAYHEKYPTIYHLRKKLVDSTDKADLRLIYLALAHMIKFRGHFLIEGDLNPDNSDVDKLFIQLVQTYNQLFEENPINASGVDAKAILSARLSKSRRLENLIAQLPGEKKNGLFGNLIALSLGLTPNFKSNFDLAEDAKLQLSKDTYDDDLDNLLAQIGDQYADLFLAAKNLSDAILLSDILRVNTEITKAPLSASMIKRYDEHHQDLTLLKALVRQQLPEKYKEIFFDQSKNGYAGYIDGGASQEEFYKFIKPILEKMDGTEELLVKLNREDLLRKQRTFDNGSIPHQIHLGELHAILRRQEDFYPFLKDNREKIEKILTFRIPYYVGPLARGNSRFAWMTRKSEETITPWNFEEVVDKGASAQSFIERMTNFDKNLPNEKVLPKHSLLYEYFTVYNELTKVKYVTEGMRKPAFLSGEQKKAIVDLLFKTNRKVTVKQLKEDYFKKIECFDSVEISGVEDRFNASLGTYHDLLKIIKDKDFLDNEENEDILEDIVLTLTLFEDREMIEERLKTYAHLFDDKVMKQLKRRRYTGWGRLSRKLINGIRDKQSGKTILDFLKSDGFANRNFMQLIHDDSLTFKEDIQKAQVSGQGDSLHEHIANLAGSPAIKKGILQTVKVVDELVKVMGRHKPENIVIEMARENQTTQKGQKNSRERMKRIEEGIKELGSQILKEHPVENTQLQNEKLYLYYLQNGRDMYVDQELDINRLSDYDVDHIVPQSFLKDDSIDNKVLTRSDKNRGKSDNVPSEEVVKKMKNYWRQLLNAKLITQRKFDNLTKAERGGLSELDKAGFIKRQLVETRQITKHVAQILDSRMNTKYDENDKLIREVKVITLKSKLVSDFRKDFQFYKVREINNYHHAHDAYLNAVVGTALIKKYPKLESEFVYGDYKVYDVRKMIAKSEQEIGKATAKYFFYSNIMNFFKTEITLANGEIRKRPLIETNGETGEIVWDKGRDFATVRKVLSMPQVNIVKKTEVQTGGFSKESILPKRNSDKLIARKKDWDPKKYGGFDSPTVAYSVLVVAKVEKGKSKKLKSVKELLGITIMERSSFEKNPIDFLEAKGYKEVKKDLIIKLPKYSLFELENGRKRMLASAGELQKGNELALPSKYVNFLYLASHYEKLKGSPGSSGSSGSETPGTSESATPESGSSGSEVEFSHEYWMRHALTLAKRARDEREVPVGAVLVLNNRVIGEGWNRAHAEIMALRQGGLVMQNYRLIDATLYVTFEPCVMCAGAMIHSRIGRVVFGVRNAKTGAAGSLMDVLHYPGMNHRVEITEGILADECAALLCYFFRMPRQVFNAQKKAQSSTDEDNEQKQLFVEQHKHYLDEIIEQISEFSKRVILADANLDKVLSAYNKHRDKPIREQAENIIHLFTLTNLGAPAAFKYFDTTIDRKRYTSTKEVLDATLIHQSITGLYETRIDLSQLGGD

SEQ ID NO: 1330 - protein, 1546 aa, synthetic construct
MDKKYSIGLAIGTNSVGWAVITDEYKVPSKKFKVLGNTDRHSIKKNLIGALLFDSGETAEATRLKRTARRRYTRRKNRICYLQEIFSNEMAKVDDSFFHRLEESFLVEEDKKHERHPIFGNIVDEVAYHEKYPTIYHLRKKLVDSTDKADLRLIYLALAHMIKFRGHFLIEGDLNPDNSDVDKLFIQLVQTYNQLFEENPINASGVDAKAILSARLSKSRRLENLIAQLPGEKKNGLFGNLIALSLGLTPNFKSNFDLAEDAKLQLSKDTYDDDLDNLLAQIGDQYADLFLAAKNLSDAILLSDILRVNTEITKAPLSASMIKRYDEHHQDLTLLKALVRQQLPEKYKEIFFDQSKNGYAGYIDGGASQEEFYKFIKPILEKMDGTEELLVKLNREDLLRKQRTFDNGSIPHQIHLGELHAILRRQEDFYPFLKDNREKIEKILTFRIPYYVGPLARGNSRFAWMTRKSEETITPWNFEEVVDKGASAQSFIERMTNFDKNLPNEKVLPKHSLLYEYFTVYNELTKVKYVTEGMRKPAFLSGEQKKAIVDLLFKTNRKVTVKQLKEDYFKKIECFDSVEISGVEDRFNASLGTYHDLLKIIKDKDFLDNEENEDILEDIVLTLTLFEDREMIEERLKTYAHLFDDKVMKQLKRRRYTGWGRLSRKLINGIRDKQSGKTILDFLKSDGFANRNFMQLIHDDSLTFKEDIQKAQVSGQGDSLHEHIANLAGSPAIKKGILQTVKVVDELVKVMGRHKPENIVIEMARENQTTQKGQKNSRERMKRIEEGIKELGSQILKEHPVENTQLQNEKLYLYYLQNGRDMYVDQELDINRLSDYDVDHIVPQSFLKDDSIDNKVLTRSDKNRGKSDNVPSEEVVKKMKNYWRQLLNAKLITQRKFDNLTKAERGGLSELDKAGFIKRQLVETRQITKHVAQILDSRMNTKYDENDKLIREVKVITLKSKLVSDFRKDFQFYKVREINNYHHAHDAYLNAVVGTALIKKYPKLESEFVYGDYKVYDVRKMIAKSEQEIGKATAKYFFYSNIMNFFKTEITLANGEIRKRPLIETNGETGEIVWDKGRDFATVRKVLSMPQVNIVKKTEVQTGGFSKESILPKRNSDKLIARKKDWDPKKYGGFDSPTVAYSVLVVAKVEKGKSKKLKSVKELLGITIMERSSFEKNPIDFLEAKGYKEVKKDLIIKLPKYSLFELENGRKRMLASAGELQKGNELALPSKYVNFLYLASHYEKLKGSPEGSSGSSGSETPGTSESATPESGSSSGSEVEFSHEYWMRHALTLAKRARDEREVPVGAVLVLNNRVIGEGWNRAIGLHDPTAHAEIMALRQGGLVMQNYRLIDATLYVTFEPCVMCAGAMIHSRIGRVVFGVRNAKTGAAGSLMDVLHYPGMNHRVEITEGILADECAALLCYFFRMRRDNEQKQLFVEQHKHYLDEIIEQISEFSKRVILADANLDKVLSAYNKHRDKPIREQAENIIHLFTLTNLGAPAAFKYFDTTIDRKRYTSTKEVLDATLIHQSITGLYETRIDLSQLGGD

SEQ ID NO: 1331 - protein, 1546 aa, synthetic construct
MDKKYSIGLAIGTNSVGWAVITDEYKVPSKKFKVLGNTDRHSIKKNLIGALLFDSGETAEATRLKRTARRRYTRRKNRICYLQEIFSNEMAKVDDSFFHRLEESFLVEEDKKHERHPIFGNIVDEVAYHEKYPTIYHLRKKLVDSTDKADLRLIYLALAHMIKFRGHFLIEGDLNPDNSDVDKLFIQLVQTYNQLFEENPINASGVDAKAILSARLSKSRRLENLIAQLPGEKKNGLFGNLIALSLGLTPNFKSNFDLAEDAKLQLSKDTYDDDLDNLLAQIGDQYADLFLAAKNLSDAILLSDILRVNTEITKAPLSASMIKRYDEHHQDLTLLKALVRQQLPEKYKEIFFDQSKNGYAGYIDGGASQEEFYKFIKPILEKMDGTEELLVKLNREDLLRKQRTFDNGSIPHQIHLGELHAILRRQEDFYPFLKDNREKIEKILTFRIPYYVGPLARGNSRFAWMTRKSEETITPWNFEEVVDKGASAQSFIERMTNFDKNLPNEKVLPKHSLLYEYFTVYNELTKVKYVTEGMRKPAFLSGEQKKAIVDLLFKTNRKVTVKQLKEDYFKKIECFDSVEISGVEDRFNASLGTYHDLLKIIKDKDFLDNEENEDILEDIVLTLTLFEDREMIEERLKTYAHLFDDKVMKQLKRRRYTGWGRLSRKLINGIRDKQSGKTILDFLKSDGFANRNFMQLIHDDSLTFKEDIQKAQVSGQGDSLHEHIANLAGSPAIKKGILQTVKVVDELVKVMGRHKPENIVIEMARENQTTQKGQKNSRERMKRIEEGIKELGSQILKEHPVENTQLQNEKLYLYYLQNGRDMYVDQELDINRLSDYDVDHIVPQSFLKDDSIDNKVLTRSDKNRGKSDNVPSEEVVKKMKNYWRQLLNAKLITQRKFDNLTKAERGGLSELDKAGFIKRQLVETRQITKHVAQILDSRMNTKYDENDKLIREVKVITLKSKLVSDFRKDFQFYKVREINNYHHAHDAYLNAVVGTALIKKYPKLESEFVYGDYKVYDVRKMIAKSEQEIGKATAKYFFYSNIMNFFKTEITLANGEIRKRPLIETNGETGEIVWDKGRDFATVRKVLSMPQVNIVKKTEVQTGGFSKESILPKRNSDKLIARKKDWDPKKYGGFDSPTVAYSVLVVAKVEKGKSKKLKSVKELLGITIMERSSFEKNPIDFLEAKGYKEVKKDLIIKLPKYSLFELENGRKRMLASAGELQKGNELALPSKYVNFLYLASHYEKLKGSPEDGSSGSSGSETPGTSESATPESGSSSGSEVEFSHEYWMRHALTLAKRARDEREVPVGAVLVLNNRVIGEGWNRAIGLHDPTAHAEIMALRQGGLVMQNYRLIDATLYVTFEPCVMCAGAMIHSRIGRVVFGVRNAKTGAAGSLMDVLHYPGMNHRVEITEGILADECAALLCYFFRMRRNEQKQLFVEQHKHYLDEIIEQISEFSKRVILADANLDKVLSAYNKHRDKPIREQAENIIHLFTLTNLGAPAAFKYFDTTIDRKRYTSTKEVLDATLIHQSITGLYETRIDLSQLGGD

SEQ ID NO: 1332 - protein, 1533 aa, synthetic construct
MDKKYSIGLAIGTNSVGWAVITDEYKVPSKKFKVLGNTDRHSIKKNLIGALLFDSGETAEATRLKRTARRRYTRRKNRICYLQEIFSNEMAKVDDSFFHRLEESFLVEEDKKHERHPIFGNIVDEVAYHEKYPTIYHLRKKLVDSTDKADLRLIYLALAHMIKFRGHFLIEGDLNPDNSDVDKLFIQLVQTYNQLFEENPINASGVDAKAILSARLSKSRRLENLIAQLPGEKKNGLFGNLIALSLGLTPNFKSNFDLAEDAKLQLSKDTYDDDLDNLLAQIGDQYADLFLAAKNLSDAILLSDILRVNTEITKAPLSASMIKRYDEHHQDLTLLKALVRQQLPEKYKEIFFDQSKNGYAGYIDGGASQEEFYKFIKPILEKMDGTEELLVKLNREDLLRKQRTFDNGSIPHQIHLGELHAILRRQEDFYPFLKDNREKIEKILTFRIPYYVGPLARGNSRFAWMTRKSEETITPWNFEEVVDKGASAQSFIERMTNFDKNLPNEKVLPKHSLLYEYFTVYNELTKVKYVTEGMRKPAFLSGEQKKAIVDLLFKTNRKVTVKQLKEDYFKKIECFDSVEISGVEDRFNASLGTYHDLLKIIKDKDFLDNEENEDILEDIVLTLTLFEDREMIEERLKTYAHLFDDKVMKQLKRRRYTGWGRLSRKLINGIRDKQSGKTILDFLKSDGFANRNFMQLIHDDSLTFKEDIQKAQVSGQGDSLHEHIANLAGSPAIKKGILQTVKVVDELVKVMGRHKPENIVIEMARENQTTQKGQKNSRERMKRIEEGIKELGSQILKEHPVENTQLQNEKLYLYYLQNGRDMYVDQELDINRLSDYDVDHIVPQSFLKDDSIDNKVLTRSDKNRGKSDNVPSEEVVKKMKNYWRQLLNAKLITQRKFDNLTKAERGGLSELDKAGFIKRQLVETRQITKHVAQILDSRMNTKYDENDKLIREVKVITLKSKLVSDFRKDFQFYKVREINNYHHAHDAYLNAVVGTALIKKYPKLESEFVYGDYKVYDVRKMIAKSEQEIGKATAKYFFYSNIMNFFKTEITLANGEIRKRPLIETNGETGEIVWDKGRDFATVRKVLSMPQVNIVKKTEVQTGGFSKESILPKRNSDKLIARKKDWDPKKYGGFDSPTVAYSVLVVAKVEKGKSKKLKSVKELLGITIMERSSFEKNPIDFLEAKGYKEVKKDLIIKLPKYSLFELENGRKRMLASAGELQKGNELALPSKYVNFLYLASHYEKLKGSPGSSGSETPGTSESATPESSGSEVEFSHEYWMRHALTLAKRARDEREVPVGAVLVLNNRVIGEGWNRAHAEIMALRQGGLVMQNYRLIDATLYVTFEPCVMCAGAMIHSRIGRVVFGVRNAKTGAAGSLMDVLHYPGMNHRVEITEGILADECAALLCYFFRMPRQEDNEQKQLFVEQHKHYLDEIIEQISEFSKRVILADANLDKVLSAYNKHRDKPIREQAENIIHLFTLTNLGAPAAFKYFDTTIDRKRYTSTKEVLDATLIHQSITGLYETRIDLSQLGGD

SEQ ID NO: 1333 - protein, 1549 aa, synthetic construct
MDKKYSIGLAIGTNSVGWAVITDEYKVPSKKFKVLGNTDRHSIKKNLIGALLFDSGETAEATRLKRTARRRYTRRKNRICYLQEIFSNEMAKVDDSFFHRLEESFLVEEDKKHERHPIFGNIVDEVAYHEKYPTIYHLRKKLVDSTDKADLRLIYLALAHMIKFRGHFLIEGDLNPDNSDVDKLFIQLVQTYNQLFEENPINASGVDAKAILSARLSKSRRLENLIAQLPGEKKNGLFGNLIALSLGLTPNFKSNFDLAEDAKLQLSKDTYDDDLDNLLAQIGDQYADLFLAAKNLSDAILLSDILRVNTEITKAPLSASMIKRYDEHHQDLTLLKALVRQQLPEKYKEIFFDQSKNGYAGYIDGGASQEEFYKFIKPILEKMDGTEELLVKLNREDLLRKQRTFDNGSIPHQIHLGELHAILRRQEDFYPFLKDNREKIEKILTFRIPYYVGPLARGNSRFAWMTRKSEETITPWNFEEVVDKGASAQSFIERMTNFDKNLPNEKVLPKHSLLYEYFTVYNELTKVKYVTEGMRKPAFLSGEQKKAIVDLLFKTNRKVTVKQLKEDYFKKIECFDSVEISGVEDRFNASLGTYHDLLKIIKDKDFLDNEENEDILEDIVLTLTLFEDREMIEERLKTYAHLFDDKVMKQLKRRRYTGWGRLSRKLINGIRDKQSGKTILDFLKSDGFANRNFMQLIHDDSLTFKEDIQKAQVSGQGDSLHEHIANLAGSPAIKKGILQTVKVVDELVKVMGRHKPENIVIEMARENQTTQKGQKNSRERMKRIEEGIKELGSQILKEHPVENTQLQNEKLYLYYLQNGRDMYVDQELDINRLSDYDVDHIVPQSFLKDDSIDNKVLTRSDKNRGKSDNVPSEEVVKKMKNYWRQLLNAKLITQRKFDNLTKAERGGLSELDKAGFIKRQLVETRQITKHVAQILDSRMNTKYDENDKLIREVKVITLKSKLVSDFRKDFQFYKVREINNYHHAHDAYLNAVVGTALSHEYWMRHALTLAKRARDEREVPVGAVLVLNNRVIGEGWNRAIGLHDPTAHAEIMALRQGGLVMQNYRLIDATLYVTFEPCVMCAGAMIHSRIGRVVFGVRNAKTGAAGSLMDVLHYPGMNHRVEITEGILADECAALLCYFFRMPRQVFNAQKKAQSSTDGSSGSETPGTSESATPESSGIKKYPKLESEFVYGDYKVYDVRKMIAKSEQEIGKATAKYFFYSNIMNFFKTEITLANGEIRKRPLIETNGETGEIVWDKGRDFATVRKVLSMPQVNIVKKTEVQTGGFSKESILPKRNSDKLIARKKDWDPKKYGGFDSPTVAYSVLVVAKVEKGKSKKLKSVKELLGITIMERSSFEKNPIDFLEAKGYKEVKKDLIIKLPKYSLFELENGRKRMLASAGELQKGNELALPSKYVNFLYLASHYEKLKGSPEDNEQKQLFVEQHKHYLDEIIEQISEFSKRVILADANLDKVLSAYNKHRDKPIREQAENIIHLFTLTNLGAPAAFKYFDTTIDRKRYTSTKEVLDATLIHQSITGLYETRIDLSQLGGD

SEQ ID NO: 1334 - protein, 1555 aa, synthetic construct
MDKKYSIGLAIGTNSVGWAVITDEYKVPSKKFKVLGNTDRHSIKKNLIGALLFDSGETAEATRLKRTARRRYTRRKNRICYLQEIFSNEMAKVDDSFFHRLEESFLVEEDKKHERHPIFGNIVDEVAYHEKYPTIYHLRKKLVDSTDKADLRLIYLALAHMIKFRGHFLIEGDLNPDNSDVDKLFIQLVQTYNQLFEENPINASGVDAKAILSARLSKSRRLENLIAQLPGEKKNGLFGNLIALSLGLTPNFKSNFDLAEDAKLQLSKDTYDDDLDNLLAQIGDQYADLFLAAKNLSDAILLSDILRVNTEITKAPLSASMIKRYDEHHQDLTLLKALVRQQLPEKYKEIFFDQSKNGYAGYIDGGASQEEFYKFIKPILEKMDGTEELLVKLNREDLLRKQRTFDNGSIPHQIHLGELHAILRRQEDFYPFLKDNREKIEKILTFRIPYYVGPLARGNSRFAWMTRKSEETITPWNFEEVVDKGASAQSFIERMTNFDKNLPNEKVLPKHSLLYEYFTVYNELTKVKYVTEGMRKPAFLSGEQKKAIVDLLFKTNRKVTVKQLKEDYFKKIECFDSVEISGVEDRFNASLGTYHDLLKIIKDKDFLDNEENEDILEDIVLTLTLFEDREMIEERLKTYAHLFDDKVMKQLKRRRYTGWGRLSRKLINGIRDKQSGKTILDFLKSDGFANRNFMQLIHDDSLTFKEDIQKAQVSGQGDSLHEHIANLAGSPAIKKGILQTVKVVDELVKVMGRHKPENIVIEMARENQTTQKGQKNSRERMKRIEEGIKELGSQILKEHPVENTQLQNEKLYLYYLQNGRDMYVDQELDINRLSDYDVDHIVPQSFLKDDSIDNKVLTRSDKNRGKSDNVPSEEVVKKMKNYWRQLLNAKLITQRKFDNLTKAERGGLSELDKAGFIKRQLVETRQITKHVAQILDSRMNTKYDENDKLIREVKVITLKSKLVSDFRKDFQFYKVREINNYHHAHDAYLNAVVGTALSHEYWMRHALTLAKRARDEREVPVGAVLVLNNRVIGEGWNRAIGLHDPTAHAEIMALRQGGLVMQNYRLIDATLYVTFEPCVMCAGAMIHSRIGRVVFGVRNAKTGAAGSLMDVLHYPGMNHRVEITEGILADECAALLCYFFRMPRQVFNAQKKAQSSTDGSSGSSGSETPGTSESATPESSGGSSIKKYPKLESEFVYGDYKVYDVRKMIAKSEQEIGKATAKYFFYSNIMNFFKTEITLANGEIRKRPLIETNGETGEIVWDKGRDFATVRKVLSMPQVNIVKKTEVQTGGFSKESILPKRNSDKLIARKKDWDPKKYGGFDSPTVAYSVLVVAKVEKGKSKKLKSVKELLGITIMERSSFEKNPIDFLEAKGYKEVKKDLIIKLPKYSLFELENGRKRMLASAGELQKGNELALPSKYVNFLYLASHYEKLKGSPEDNEQKQLFVEQHKHYLDEIIEQISEFSKRVILADANLDKVLSAYNKHRDKPIREQAENIIHLFTLTNLGAPAAFKYFDTTIDRKRYTSTKEVLDATLIHQSITGLYETRIDLSQLGGD

SEQ ID NO: 1335 - protein, 1421 aa, synthetic construct
MDKKYSIGLAIGTNSVGWAVITDEYKVPSKKFKVLGNTDRHSIKKNLIGALLFDSGETAEATRLKRTARRRYTRRKNRICYLQEIFSNEMAKVDDSFFHRLEESFLVEEDKKHERHPIFGNIVDEVAYHEKYPTIYHLRKKLVDSTDKADLRLIYLALAHMIKFRGHFLIEGDLNPDNSDVDKLFIQLVQTYNQLFEENPINASGVDAKAILSARLSKSRRLENLIAQLPGEKKNGLFGNLIALSLGLTPNFKSNFDLAEDAKLQLSKDTYDDDLDNLLAQIGDQYADLFLAAKNLSDAILLSDILRVNTEITKAPLSASMIKRYDEHHQDLTLLKALVRQQLPEKYKEIFFDQSKNGYAGYIDGGASQEEFYKFIKPILEKMDGTEELLVKLNREDLLRKQRTFDNGSIPHQIHLGELHAILRRQEDFYPFLKDNREKIEKILTFRIPYYVGPLARGNSRFAWMTRKSEETITPWNFEEVVDKGASAQSFIERMTNFDKNLPNEKVLPKHSLLYEYFTVYNELTKVKYVTEGMRKPAFLSGEQKKAIVDLLFKTNRKVTVKQLKEDYFKKIECFDSVEISGVEDRFNASLGTYHDLLKIIKDKDFLDNEENEDILEDIVLTLTLFEDREMIEERLKTYAHLFDDKVMKQLKRRRYTGWGRLSRKLINGIRDKQSGKTILDFLKSDGFANRNFMQLIHDDSLTFKEDIQKAQVSGQGDSLHEHIANLAGSPAIKKGILQTVKVVDELVKVMGRHKPENIVIEMARENQTTQKGQKNSRERMKRIEEGIKELGSEVEFSHEYWMRHALTLAKRARDEREVPVGAVLVLNNRVIGEGWNRAIGLHDPTAHAEIMALRQGGLVMQNYRLIDATLYVTFEPCVMCAGAMIHSRIGRVVFGVRNAKTGAAGSLMDVLHYPGMNHRVEITEGILADECAALLCYFFRMPRQVFNAQKKAQSSTDGGLSELDKAGFIKRQLVETRQITKHVAQILDSRMNTKYDENDKLIREVKVITLKSKLVSDFRKDFQFYKVREINNYHHAHDAYLNAVVGTALIKKYPKLESEFVYGDYKVYDVRKMIAKSEQEIGKATAKYFFYSNIMNFFKTEITLANGEIRKRPLIETNGETGEIVWDKGRDFATVRKVLSMPQVNIVKKTEVQTGGFSKESILPKRNSDKLIARKKDWDPKKYGGFDSPTVAYSVLVVAKVEKGKSKKLKSVKELLGITIMERSSFEKNPIDFLEAKGYKEVKKDLIIKLPKYSLFELENGRKRMLASAGELQKGNELALPSKYVNFLYLASHYEKLKGSPEDNEQKQLFVEQHKHYLDEIIEQISEFSKRVILADANLDKVLSAYNKHRDKPIREQAENIIHLFTLTNLGAPAAFKYFDTTIDRKRYTSTKEVLDATLIHQSITGLYETRIDLSQLGGD

SEQ ID NO: 1336 - protein, 1552 aa, synthetic construct
MSEVEFSHEYWMRHALTLAKRARDEREVPVGAVLVLNNRVIGEGWNRAIGLHDPTAHAEIMALRQGGLVMQNYRLIDATLYVTFEPCVMCAGAMIHSRIGRVVFGVRNAKTGAAGSLMDVLHYPGMNHRVEITEGILADECAALLCYFFRMPRSGGSSGGSSGSETPGTSESATPESSGGSSGGSDKKYSIGLAIGTNSVGWAVITDEYKVPSKKFKVLGNTDRHSIKKNLIGALLFDSGETAEATRLKRTARRRYTRRKNRICYLQEIFSNEMAKVDDSFFHRLEESFLVEEDKKHERHPIFGNIVDEVAYHEKYPTIYHLRKKLVDSTDKADLRLIYLALAHMIKFRGHFLIEGDLNPDNSDVDKLFIQLVQTYNQLFEENPINASGVDAKAILSARLSKSRRLENLIAQLPGEKKNGLFGNLIALSLGLTPNFKSNFDLAEDAKLQLSKDTYDDDLDNLLAQIGDQYADLFLAAKNLSDAILLSDILRVNTEITKAPLSASMIKRYDEHHQDLTLLKALVRQQLPEKYKEIFFDQSKNGYAGYIDGGASQEEFYKFIKPILEKMDGTEELLVKLNREDLLRKQRTFDNGSIPHQIHLGELHAILRRQEDFYPFLKDNREKIEKILTFRIPYYVGPLARGNSRFAWMTRKSEETITPWNFEEVVDKGASAQSFIERMTNFDKNLPNEKVLPKHSLLYEYFTVYNELTKVKYVTEGMRKPAFLSGEQKKAIVDLLFKTNRKVTVKQLKEDYFKKIECFDSVEISGVEDRFNASLGTYHDLLKIIKDKDFLDNEENEDILEDIVLTLTLFEDREMIEERLKTYAHLFDDKVMKQLKRRRYTGWGRLSRKLINGIRDKQSGKTILDFLKSDGFANRNFMQLIHDDSLTFKEDIQKAQVSGQGDSLHEHIANLAGSPAIKKGILQTVKVVDELVKVMGRHKPENIVIEMARENQTTQKGQKNSRERMKRIEEGIKELGSQILKEHPVENTQLQNEKLYLYYLQNGRDMYVDQELDINRLSDYDVDHIVPQSFLKDDSIDNKVLTRSDKNRGKSDNVPSEEVVKKMKNYWRQLLNAKLITQRKFDNLTKAERGGLSELDKAGFIKRQLVETRQITKHVAQILDSRMNTKYDENDKLIREVKVITLKSKLVSDFRKDFQFYKVREINNYHHAHDAYLNAVVGTALIKKYPKLESEFVYGDYKVYDVRKMIAKSEQEIGKATAKYFFYSNIMNFFKTEITLANGEIRKRPLIETNGETGEIVWDKGRDFATVRKVLSMPQVNIVKKTEVQTGGFSKESILPKRNSDKLIARKKDWDPKKYGGFDSPTVAYSVLVVAKVEKGKSKKLKSVKELLGITIMERSSFEKNPIDFLEAKGYKEVKKDLIIKLPKYSLFELENGRKRMLASAGELQKGNELALPSKYVNFLYLASHYEKLKGSPEDNEQKQLFVEQHKHYLDEIIEQISEFSKRVILADANLDKVLSAYNKHRDKPIREQAENIIHLFTLTNLGAPAAFKYFDTTIDRKRYTSTKEVLDATLIHQSITGLYETRIDLSQLGGD

SEQ ID NO: 1337 - protein, 1545 aa, synthetic construct
MSEVEFSHEYWMRHALTLAKRARDEREVPVGAVLVLNNRVIGEGWNRTAHAEIMALRQGGLVMQNYRLIDATLYVTFEPCVMCAGAMIHSRIGRVVFGVRNAKTGAAGSLMDVLHYPGMNHRVEITEGILADECAALLCYFFRMPRSGGSSGGSSGSETPGTSESATPESSGGSSGGSDKKYSIGLAIGTNSVGWAVITDEYKVPSKKFKVLGNTDRHSIKKNLIGALLFDSGETAEATRLKRTARRRYTRRKNRICYLQEIFSNEMAKVDDSFFHRLEESFLVEEDKKHERHPIFGNIVDEVAYHEKYPTIYHLRKKLVDSTDKADLRLIYLALAHMIKFRGHFLIEGDLNPDNSDVDKLFIQLVQTYNQLFEENPINASGVDAKAILSARLSKSRRLENLIAQLPGEKKNGLFGNLIALSLGLTPNFKSNFDLAEDAKLQLSKDTYDDDLDNLLAQIGDQYADLFLAAKNLSDAILLSDILRVNTEITKAPLSASMIKRYDEHHQDLTLLKALVRQQLPEKYKEIFFDQSKNGYAGYIDGGASQEEFYKFIKPILEKMDGTEELLVKLNREDLLRKQRTFDNGSIPHQIHLGELHAILRRQEDFYPFLKDNREKIEKILTFRIPYYVGPLARGNSRFAWMTRKSEETITPWNFEEVVDKGASAQSFIERMTNFDKNLPNEKVLPKHSLLYEYFTVYNELTKVKYVTEGMRKPAFLSGEQKKAIVDLLFKTNRKVTVKQLKEDYFKKIECFDSVEISGVEDRFNASLGTYHDLLKIIKDKDFLDNEENEDILEDIVLTLTLFEDREMIEERLKTYAHLFDDKVMKQLKRRRYTGWGRLSRKLINGIRDKQSGKTILDFLKSDGFANRNFMQLIHDDSLTFKEDIQKAQVSGQGDSLHEHIANLAGSPAIKKGILQTVKVVDELVKVMGRHKPENIVIEMARENQTTQKGQKNSRERMKRIEEGIKELGSQILKEHPVENTQLQNEKLYLYYLQNGRDMYVDQELDINRLSDYDVDHIVPQSFLKDDSIDNKVLTRSDKNRGKSDNVPSEEVVKKMKNYWRQLLNAKLITQRKFDNLTKAERGGLSELDKAGFIKRQLVETRQITKHVAQILDSRMNTKYDENDKLIREVKVITLKSKLVSDFRKDFQFYKVREINNYHHAHDAYLNAVVGTALIKKYPKLESEFVYGDYKVYDVRKMIAKSEQEIGKATAKYFFYSNIMNFFKTEITLANGEIRKRPLIETNGETGEIVWDKGRDFATVRKVLSMPQVNIVKKTEVQTGGFSKESILPKRNSDKLIARKKDWDPKKYGGFDSPTVAYSVLVVAKVEKGKSKKLKSVKELLGITIMERSSFEKNPIDFLEAKGYKEVKKDLIIKLPKYSLFELENGRKRMLASAGELQKGNELALPSKYVNFLYLASHYEKLKGSPEDNEQKQLFVEQHKHYLDEIIEQISEFSKRVILADANLDKVLSAYNKHRDKPIREQAENIIHLFTLTNLGAPAAFKYFDTTIDRKRYTSTKEVLDATLIHQSITGLYETRIDLSQLGGD

SEQ ID NO: 1338 - protein, 1541 aa, synthetic construct
MDKKYSIGLAIGTNSVGWAVITDEYKVPSKKFKVLGNTDRHSIKKNLIGALLFDSGETAEATRLKRTARRRYTRRKNRICYLQEIFSNEMAKVDDSFFHRLEESFLVEEDKKHERHPIFGNIVDEVAYHEKYPTIYHLRKKLVDSTDKADLRLIYLALAHMIKFRGHFLIEGDLNPDNSDVDKLFIQLVQTYNQLFEENPINASGVDAKAILSARLSKSRRLENLIAQLPGEKKNGLFGNLIALSLGLTPNFKSNFDLAEDAKLQLSKDTYDDDLDNLLAQIGDQYADLFLAAKNLSDAILLSDILRVNTEITKAPLSASMIKRYDEHHQDLTLLKALVRQQLPEKYKEIFFDQSKNGYAGYIDGGASQEEFYKFIKPILEKMDGTEELLVKLNREDLLRKQRTFDNGSIPHQIHLGELHAILRRQEDFYPFLKDNREKIEKILTFRIPYYVGPLARGNSRFAWMTRKSEETITPWNFEEVVDKGASAQSFIERMTNFDKNLPNEKVLPKHSLLYEYFTVYNELTKVKYVTEGMRKPAFLSGEQKKAIVDLLFKTNRKVTVKQLKEDYFKKIECFDSVEISGVEDRFNASLGTYHDLLKIIKDKDFLDNEENEDILEDIVLTLTLFEDREMIEERLKTYAHLFDDKVMKQLKRRRYTGWGRLSRKLINGIRDKQSGKTILDFLKSDGFANRNFMQLIHDDSLTFKEDIQKAQVSGQGDSLHEHIANLAGSPAIKKGILQTVKVVDELVKVMGRHKPENIVIEMARENQTTQKGQKNSRERMKRIEEGIKELGSQILKEHPVENTQLQNEKLYLYYLQNGRDMYVDQELDINRLSDYDVDHIVPQSFLKDDSIDNKVLTRSDKNRGKSDNVPSEEVVKKMKNYWRQLLNAKLITQRKFDNLTKAERGGLSELDKAGFIKRQLVETRQITKHVAQILDSRMNTKYDENDKLIREVKVITLKSKLVSDFRKDFQFYKVREINNYHHAHDAYLNAVVGTALIKKYPKGSSGSETPGTSESATPESSGSEVEFSHEYWMRHALTLAKRARDEREVPVGAVLVLNNRVIGEGWNRAIGLHDPTAHAEIMALRQGGLVMQNYRLIDATLYVTFEPCVMCAGAMIHSRIGRVVFGVRNAKTGAAGSLMDVLHYPGMNHRVEITEGILADECAALLCYFFRMPRQLESEFVYGDYKVYDVRKMIAKSEQEIGKATAKYFFYSNIMNFFKTEITLANGEIRKRPLIETNGETGEIVWDKGRDFATVRKVLSMPQVNIVKKTEVQTGGFSKESILPKRNSDKLIARKKDWDPKKYGGFDSPTVAYSVLVVAKVEKGKSKKLKSVKELLGITIMERSSFEKNPIDFLEAKGYKEVKKDLIIKLPKYSLFELENGRKRMLASAGELQKGNELALPSKYVNFLYLASHYEKLKGSPEDNEQKQLFVEQHKHYLDEIIEQISEFSKRVILADANLDKVLSAYNKHRDKPIREQAENIIHLFTLTNLGAPAAFKYFDTTIDRKRYTSTKEVLDATLIHQSITGLYETRIDLSQLGGD

SEQ ID NO: 1339 - protein, 1541 aa, synthetic construct
MDKKYSIGLAIGTNSVGWAVITDEYKVPSKKFKVLGNTDRHSIKKNLIGALLFDSGETAEATRLKRTARRRYTRRKNRICYLQEIFSNEMAKVDDSFFHRLEESFLVEEDKKHERHPIFGNIVDEVAYHEKYPTIYHLRKKLVDSTDKADLRLIYLALAHMIKFRGHFLIEGDLNPDNSDVDKLFIQLVQTYNQLFEENPINASGVDAKAILSARLSKSRRLENLIAQLPGEKKNGLFGNLIALSLGLTPNFKSNFDLAEDAKLQLSKDTYDDDLDNLLAQIGDQYADLFLAAKNLSDAILLSDILRVNTEITKAPLSASMIKRYDEHHQDLTLLKALVRQQLPEKYKEIFFDQSKNGYAGYIDGGASQEEFYKFIKPILEKMDGTEELLVKLNREDLLRKQRTFDNGSIPHQIHLGELHAILRRQEDFYPFLKDNREKIEKILTFRIPYYVGPLARGNSRFAWMTRKSEETITPWNFEEVVDKGASAQSFIERMTNFDKNLPNEKVLPKHSLLYEYFTVYNELTKVKYVTEGMRKPAFLSGEQKKAIVDLLFKTNRKVTVKQLKEDYFKKIECFDSVEISGVEDRFNASLGTYHDLLKIIKDKDFLDNEENEDILEDIVLTLTLFEDREMIEERLKTYAHLFDDKVMKQLKRRRYTGWGRLSRKLINGIRDKQSGKTILDFLKSDGFANRNFMQLIHDDSLTFKEDIQKAQVSGQGDSLHEHIANLAGSPAIKKGILQTVKVVDELVKVMGRHKPENIVIEMARENQTTQKGQKNSRERMKRIEEGIKELGSQILKEHPVENTQLQNEKLYLYYLQNGRDMYVDQELDINRLSDYDVDHIVPQSFLKDDSIDNKVLTRSDKNRGKSDNVPSEEVVKKMKNYWRQLLNAKLITQRKFDNLTKAERGGLSELDKAGFIKRQLVETRQITKHVAQILDSRMNTKYDENDKLIREVKVITLKSKLVSDFRKDFQFYKVREINNYHHAHDAYLNAVVGTALIKKYPKLGSSGSETPGTSESATPESSGSEVEFSHEYWMRHALTLAKRARDEREVPVGAVLVLNNRVIGEGWNRAIGLHDPTAHAEIMALRQGGLVMQNYRLIDATLYVTFEPCVMCAGAMIHSRIGRVVFGVRNAKTGAAGSLMDVLHYPGMNHRVEITEGILADECAALLCYFFRMPRQESEFVYGDYKVYDVRKMIAKSEQEIGKATAKYFFYSNIMNFFKTEITLANGEIRKRPLIETNGETGEIVWDKGRDFATVRKVLSMPQVNIVKKTEVQTGGFSKESILPKRNSDKLIARKKDWDPKKYGGFDSPTVAYSVLVVAKVEKGKSKKLKSVKELLGITIMERSSFEKNPIDFLEAKGYKEVKKDLIIKLPKYSLFELENGRKRMLASAGELQKGNELALPSKYVNFLYLASHYEKLKGSPEDNEQKQLFVEQHKHYLDEIIEQISEFSKRVILADANLDKVLSAYNKHRDKPIREQAENIIHLFTLTNLGAPAAFKYFDTTIDRKRYTSTKEVLDATLIHQSITGLYETRIDLSQLGGD

SEQ ID NO: 1340 - protein, 1541 aa, synthetic construct
MDKKYSIGLAIGTNSVGWAVITDEYKVPSKKFKVLGNTDRHSIKKNLIGALLFDSGETAEATRLKRTARRRYTRRKNRICYLQEIFSNEMAKVDDSFFHRLEESFLVEEDKKHERHPIFGNIVDEVAYHEKYPTIYHLRKKLVDSTDKADLRLIYLALAHMIKFRGHFLIEGDLNPDNSDVDKLFIQLVQTYNQLFEENPINASGVDAKAILSARLSKSRRLENLIAQLPGEKKNGLFGNLIALSLGLTPNFKSNFDLAEDAKLQLSKDTYDDDLDNLLAQIGDQYADLFLAAKNLSDAILLSDILRVNTEITKAPLSASMIKRYDEHHQDLTLLKALVRQQLPEKYKEIFFDQSKNGYAGYIDGGASQEEFYKFIKPILEKMDGTEELLVKLNREDLLRKQRTFDNGSIPHQIHLGELHAILRRQEDFYPFLKDNREKIEKILTFRIPYYVGPLARGNSRFAWMTRKSEETITPWNFEEVVDKGASAQSFIERMTNFDKNLPNEKVLPKHSLLYEYFTVYNELTKVKYVTEGMRKPAFLSGEQKKAIVDLLFKTNRKVTVKQLKEDYFKKIECFDSVEISGVEDRFNASLGTYHDLLKIIKDKDFLDNEENEDILEDIVLTLTLFEDREMIEERLKTYAHLFDDKVMKQLKRRRYTGWGRLSRKLINGIRDKQSGKTILDFLKSDGFANRNFMQLIHDDSLTFKEDIQKAQVSGQGDSLHEHIANLAGSPAIKKGILQTVKVVDELVKVMGRHKPENIVIEMARENQTTQKGQKNSRERMKRIEEGIKELGSQILKEHPVENTQLQNEKLYLYYLQNGRDMYVDQELDINRLSDYDVDHIVPQSFLKDDSIDNKVLTRSDKNRGKSDNVPSEEVVKKMKNYWRQLLNAKLITQRKFDNLTKAERGGLSELDKAGFIKRQLVETRQITKHVAQILDSRMNTKYDENDKLIREVKVITLKSKLVSDFRKDFQFYKVREINNYHHAHDAYLNAVVGTALIKKYPKLEGSSGSETPGTSESATPESSGSEVEFSHEYWMRHALTLAKRARDEREVPVGAVLVLNNRVIGEGWNRAIGLHDPTAHAEIMALRQGGLVMQNYRLIDATLYVTFEPCVMCAGAMIHSRIGRVVFGVRNAKTGAAGSLMDVLHYPGMNHRVEITEGILADECAALLCYFFRMPRQSEFVYGDYKVYDVRKMIAKSEQEIGKATAKYFFYSNIMNFFKTEITLANGEIRKRPLIETNGETGEIVWDKGRDFATVRKVLSMPQVNIVKKTEVQTGGFSKESILPKRNSDKLIARKKDWDPKKYGGFDSPTVAYSVLVVAKVEKGKSKKLKSVKELLGITIMERSSFEKNPIDFLEAKGYKEVKKDLIIKLPKYSLFELENGRKRMLASAGELQKGNELALPSKYVNFLYLASHYEKLKGSPEDNEQKQLFVEQHKHYLDEIIEQISEFSKRVILADANLDKVLSAYNKHRDKPIREQAENIIHLFTLTNLGAPAAFKYFDTTIDRKRYTSTKEVLDATLIHQSITGLYETRIDLSQLGGD

SEQ ID NO: 1341 - protein, 1541 aa, synthetic construct
MDKKYSIGLAIGTNSVGWAVITDEYKVPSKKFKVLGNTDRHSIKKNLIGALLFDSGETAEATRLKRTARRRYTRRKNRICYLQEIFSNEMAKVDDSFFHRLEESFLVEEDKKHERHPIFGNIVDEVAYHEKYPTIYHLRKKLVDSTDKADLRLIYLALAHMIKFRGHFLIEGDLNPDNSDVDKLFIQLVQTYNQLFEENPINASGVDAKAILSARLSKSRRLENLIAQLPGEKKNGLFGNLIALSLGLTPNFKSNFDLAEDAKLQLSKDTYDDDLDNLLAQIGDQYADLFLAAKNLSDAILLSDILRVNTEITKAPLSASMIKRYDEHHQDLTLLKALVRQQLPEKYKEIFFDQSKNGYAGYIDGGASQEEFYKFIKPILEKMDGTEELLVKLNREDLLRKQRTFDNGSIPHQIHLGELHAILRRQEDFYPFLKDNREKIEKILTFRIPYYVGPLARGNSRFAWMTRKSEETITPWNFEEVVDKGASAQSFIERMTNFDKNLPNEKVLPKHSLLYEYFTVYNELTKVKYVTEGMRKPAFLSGEQKKAIVDLLFKTNRKVTVKQLKEDYFKKIECFDSVEISGVEDRFNASLGTYHDLLKIIKDKDFLDNEENEDILEDIVLTLTLFEDREMIEERLKTYAHLFDDKVMKQLKRRRYTGWGRLSRKLINGIRDKQSGKTILDFLKSDGFANRNFMQLIHDDSLTFKEDIQKAQVSGQGDSLHEHIANLAGSPAIKKGILQTVKVVDELVKVMGRHKPENIVIEMARENQTTQKGQKNSRERMKRIEEGIKELGSQILKEHPVENTQLQNEKLYLYYLQNGRDMYVDQELDINRLSDYDVDHIVPQSFLKDDSIDNKVLTRSDKNRGKSDNVPSEEVVKKMKNYWRQLLNAKLITQRKFDNLTKAERGGLSELDKAGFIKRQLVETRQITKHVAQILDSRMNTKYDENDKLIREVKVITLKSKLVSDFRKDFQFYKVREINNYHHAHDAYLNAVVGTALIKKYPKLESGSSGSETPGTSESATPESSGSEVEFSHEYWMRHALTLAKRARDEREVPVGAVLVLNNRVIGEGWNRAIGLHDPTAHAEIMALRQGGLVMQNYRLIDATLYVTFEPCVMCAGAMIHSRIGRVVFGVRNAKTGAAGSLMDVLHYPGMNHRVEITEGILADECAALLCYFFRMPRQEFVYGDYKVYDVRKMIAKSEQEIGKATAKYFFYSNIMNFFKTEITLANGEIRKRPLIETNGETGEIVWDKGRDFATVRKVLSMPQVNIVKKTEVQTGGFSKESILPKRNSDKLIARKKDWDPKKYGGFDSPTVAYSVLVVAKVEKGKSKKLKSVKELLGITIMERSSFEKNPIDFLEAKGYKEVKKDLIIKLPKYSLFELENGRKRMLASAGELQKGNELALPSKYVNFLYLASHYEKLKGSPEDNEQKQLFVEQHKHYLDEIIEQISEFSKRVILADANLDKVLSAYNKHRDKPIREQAENIIHLFTLTNLGAPAAFKYFDTTIDRKRYTSTKEVLDATLIHQSITGLYETRIDLSQLGGD

SEQ ID NO: 1342 - protein, 1541 aa, synthetic construct
MDKKYSIGLAIGTNSVGWAVITDEYKVPSKKFKVLGNTDRHSIKKNLIGALLFDSGETAEATRLKRTARRRYTRRKNRICYLQEIFSNEMAKVDDSFFHRLEESFLVEEDKKHERHPIFGNIVDEVAYHEKYPTIYHLRKKLVDSTDKADLRLIYLALAHMIKFRGHFLIEGDLNPDNSDVDKLFIQLVQTYNQLFEENPINASGVDAKAILSARLSKSRRLENLIAQLPGEKKNGLFGNLIALSLGLTPNFKSNFDLAEDAKLQLSKDTYDDDLDNLLAQIGDQYADLFLAAKNLSDAILLSDILRVNTEITKAPLSASMIKRYDEHHQDLTLLKALVRQQLPEKYKEIFFDQSKNGYAGYIDGGASQEEFYKFIKPILEKMDGTEELLVKLNREDLLRKQRTFDNGSIPHQIHLGELHAILRRQEDFYPFLKDNREKIEKILTFRIPYYVGPLARGNSRFAWMTRKSEETITPWNFEEVVDKGASAQSFIERMTNFDKNLPNEKVLPKHSLLYEYFTVYNELTKVKYVTEGMRKPAFLSGEQKKAIVDLLFKTNRKVTVKQLKEDYFKKIECFDSVEISGVEDRFNASLGTYHDLLKIIKDKDFLDNEENEDILEDIVLTLTLFEDREMIEERLKTYAHLFDDKVMKQLKRRRYTGWGRLSRKLINGIRDKQSGKTILDFLKSDGFANRNFMQLIHDDSLTFKEDIQKAQVSGQGDSLHEHIANLAGSPAIKKGILQTVKVVDELVKVMGRHKPENIVIEMARENQTTQKGQKNSRERMKRIEEGIKELGGSSGSETPGTSESATPESSGSEVEFSHEYWMRHALTLAKRARDEREVPVGAVLVLNNRVIGEGWNRAIGLHDPTAHAEIMALRQGGLVMQNYRLIDATLYVTFEPCVMCAGAMIHSRIGRVVFGVRNAKTGAAGSLMDVLHYPGMNHRVEITEGILADECAALLCYFFRMPRQSQILKEHPVENTQLQNEKLYLYYLQNGRDMYVDQELDINRLSDYDVDHIVPQSFLKDDSIDNKVLTRSDKNRGKSDNVPSEEVVKKMKNYWRQLLNAKLITQRKFDNLTKAERGGLSELDKAGFIKRQLVETRQITKHVAQILDSRMNTKYDENDKLIREVKVITLKSKLVSDFRKDFQFYKVREINNYHHAHDAYLNAVVGTALIKKYPKLESEFVYGDYKVYDVRKMIAKSEQEIGKATAKYFFYSNIMNFFKTEITLANGEIRKRPLIETNGETGEIVWDKGRDFATVRKVLSMPQVNIVKKTEVQTGGFSKESILPKRNSDKLIARKKDWDPKKYGGFDSPTVAYSVLVVAKVEKGKSKKLKSVKELLGITIMERSSFEKNPIDFLEAKGYKEVKKDLIIKLPKYSLFELENGRKRMLASAGELQKGNELALPSKYVNFLYLASHYEKLKGSPEDNEQKQLFVEQHKHYLDEIIEQISEFSKRVILADANLDKVLSAYNKHRDKPIREQAENIIHLFTLTNLGAPAAFKYFDTTIDRKRYTSTKEVLDATLIHQSITGLYETRIDLSQLGGD

SEQ ID NO: 1343 - protein, 1541 aa, synthetic construct
MDKKYSIGLAIGTNSVGWAVITDEYKVPSKKFKVLGNTDRHSIKKNLIGALLFDSGETAEATRLKRTARRRYTRRKNRICYLQEIFSNEMAKVDDSFFHRLEESFLVEEDKKHERHPIFGNIVDEVAYHEKYPTIYHLRKKLVDSTDKADLRLIYLALAHMIKFRGHFLIEGDLNPDNSDVDKLFIQLVQTYNQLFEENPINASGVDAKAILSARLSKSRRLENLIAQLPGEKKNGLFGNLIALSLGLTPNFKSNFDLAEDAKLQLSKDTYDDDLDNLLAQIGDQYADLFLAAKNLSDAILLSDILRVNTEITKAPLSASMIKRYDEHHQDLTLLKALVRQQLPEKYKEIFFDQSKNGYAGYIDGGASQEEFYKFIKPILEKMDGTEELLVKLNREDLLRKQRTFDNGSIPHQIHLGELHAILRRQEDFYPFLKDNREKIEKILTFRIPYYVGPLARGNSRFAWMTRKSEETITPWNFEEVVDKGASAQSFIERMTNFDKNLPNEKVLPKHSLLYEYFTVYNELTKVKYVTEGMRKPAFLSGEQKKAIVDLLFKTNRKVTVKQLKEDYFKKIECFDSVEISGVEDRFNASLGTYHDLLKIIKDKDFLDNEENEDILEDIVLTLTLFEDREMIEERLKTYAHLFDDKVMKQLKRRRYTGWGRLSRKLINGIRDKQSGKTILDFLKSDGFANRNFMQLIHDDSLTFKEDIQKAQVSGQGDSLHEHIANLAGSPAIKKGILQTVKVVDELVKVMGRHKPENIVIEMARENQTTQKGQKNSRERMKRIEEGIKELGSSGSETPGTSESATPESSGSEVEFSHEYWMRHALTLAKRARDEREVPVGAVLVLNNRVIGEGWNRAIGLHDPTAHAEIMALRQGGLVMQNYRLIDATLYVTFEPCVMCAGAMIHSRIGRVVFGVRNAKTGAAGSLMDVLHYPGMNHRVEITEGILADECAALLCYFFRMPRQGSQILKEHPVENTQLQNEKLYLYYLQNGRDMYVDQELDINRLSDYDVDHIVPQSFLKDDSIDNKVLTRSDKNRGKSDNVPSEEVVKKMKNYWRQLLNAKLITQRKFDNLTKAERGGLSELDKAGFIKRQLVETRQITKHVAQILDSRMNTKYDENDKLIREVKVITLKSKLVSDFRKDFQFYKVREINNYHHAHDAYLNAVVGTALIKKYPKLESEFVYGDYKVYDVRKMIAKSEQEIGKATAKYFFYSNIMNFFKTEITLANGEIRKRPLIETNGETGEIVWDKGRDFATVRKVLSMPQVNIVKKTEVQTGGFSKESILPKRNSDKLIARKKDWDPKKYGGFDSPTVAYSVLVVAKVEKGKSKKLKSVKELLGITIMERSSFEKNPIDFLEAKGYKEVKKDLIIKLPKYSLFELENGRKRMLASAGELQKGNELALPSKYVNFLYLASHYEKLKGSPEDNEQKQLFVEQHKHYLDEIIEQISEFSKRVILADANLDKVLSAYNKHRDKPIREQAENIIHLFTLTNLGAPAAFKYFDTTIDRKRYTSTKEVLDATLIHQSITGLYETRIDLSQLGGD

SEQ ID NO: 1344 - protein, 1541 aa, synthetic construct
MDKKYSIGLAIGTNSVGWAVITDEYKVPSKKFKVLGNTDRHSIKKNLIGALLFDSGETAEATRLKRTARRRYTRRKNRICYLQEIFSNEMAKVDDSFFHRLEESFLVEEDKKHERHPIFGNIVDEVAYHEKYPTIYHLRKKLVDSTDKADLRLIYLALAHMIKFRGHFLIEGDLNPDNSDVDKLFIQLVQTYNQLFEENPINASGVDAKAILSARLSKSRRLENLIAQLPGEKKNGLFGNLIALSLGLTPNFKSNFDLAEDAKLQLSKDTYDDDLDNLLAQIGDQYADLFLAAKNLSDAILLSDILRVNTEITKAPLSASMIKRYDEHHQDLTLLKALVRQQLPEKYKEIFFDQSKNGYAGYIDGGASQEEFYKFIKPILEKMDGTEELLVKLNREDLLRKQRTFDNGSIPHQIHLGELHAILRRQEDFYPFLKDNREKIEKILTFRIPYYVGPLARGNSRFAWMTRKSEETITPWNFEEVVDKGASAQSFIERMTNFDKNLPNEKVLPKHSLLYEYFTVYNELTKVKYVTEGMRKPAFLSGEQKKAIVDLLFKTNRKVTVKQLKEDYFKKIECFDSVEISGVEDRFNASLGTYHDLLKIIKDKDFLDNEENEDILEDIVLTLTLFEDREMIEERLKTYAHLFDDKVMKQLKRRRYTGWGRLSRKLINGIRDKQSGKTILDFLKSDGFANRNFMQLIHDDSLTFKEDIQKAQVSGQGDSLHEHIANLAGSPAIKKGILQTVKVVDELVKVMGRHKPENIVIEMARENQTTQKGQKNSRERMKRIEEGIKEGSSGSETPGTSESATPESSGSEVEFSHEYWMRHALTLAKRARDEREVPVGAVLVLNNRVIGEGWNRAIGLHDPTAHAEIMALRQGGLVMQNYRLIDATLYVTFEPCVMCAGAMIHSRIGRVVFGVRNAKTGAAGSLMDVLHYPGMNHRVEITEGILADECAALLCYFFRMPRQLGSQILKEHPVENTQLQNEKLYLYYLQNGRDMYVDQELDINRLSDYDVDHIVPQSFLKDDSIDNKVLTRSDKNRGKSDNVPSEEVVKKMKNYWRQLLNAKLITQRKFDNLTKAERGGLSELDKAGFIKRQLVETRQITKHVAQILDSRMNTKYDENDKLIREVKVITLKSKLVSDFRKDFQFYKVREINNYHHAHDAYLNAVVGTALIKKYPKLESEFVYGDYKVYDVRKMIAKSEQEIGKATAKYFFYSNIMNFFKTEITLANGEIRKRPLIETNGETGEIVWDKGRDFATVRKVLSMPQVNIVKKTEVQTGGFSKESILPKRNSDKLIARKKDWDPKKYGGFDSPTVAYSVLVVAKVEKGKSKKLKSVKELLGITIMERSSFEKNPIDFLEAKGYKEVKKDLIIKLPKYSLFELENGRKRMLASAGELQKGNELALPSKYVNFLYLASHYEKLKGSPEDNEQKQLFVEQHKHYLDEIIEQISEFSKRVILADANLDKVLSAYNKHRDKPIREQAENIIHLFTLTNLGAPAAFKYFDTTIDRKRYTSTKEVLDATLIHQSITGLYETRIDLSQLGGD

SEQ ID NO: 1345 - protein, 1484 aa, synthetic construct
MDKKYSIGLAIGTNSVGWAVITDEYKVPSKKFKVLGNTDRHSIKKNLIGALLFDSGETAEATRLKRTARRRYTRRKNRICYLQEIFSNEMAKVDDSFFHRLEESFLVEEDKKHERHPIFGNIVDEVAYHEKYPTIYHLRKKLVDSTDKADLRLIYLALAHMIKFRGHFLIEGDLNPDNSDVDKLFIQLVQTYNQLFEENPINASGVDAKAILSARLSKSRRLENLIAQLPGEKKNGLFGNLIALSLGLTPNFKSNFDLAEDAKLQLSKDTYDDDLDNLLAQIGDQYADLFLAAKNLSDAILLSDILRVNTEITKAPLSASMIKRYDEHHQDLTLLKALVRQQLPEKYKEIFFDQSKNGYAGYIDGGASQEEFYKFIKPILEKMDGTEELLVKLNREDLLRKQRTFDNGSIPHQIHLGELHAILRRQEDFYPFLKDNREKIEKILTFRIPYYVGPLARGNSRFAWMTRKSEETITPWNFEEVVDKGASAQSFIERMTNFDKNLPNEKVLPKHSLLYEYFTVYNELTKVKYVTEGMRKPAFLSGEQKKAIVDLLFKTNRKVTVKQLKEDYFKKIECFDSVEISGVEDRFNASLGTYHDLLKIIKDKDFLDNEENEDILEDIVLTLTLFEDREMIEERLKTYAHLFDDKVMKQLKRRRYTGWGRLSRKLINGIRDKQSGKTILDFLKSDGFANRNFMQLIHDDSLTFKEDIQKAQVSGQGDSLHEHIANLAGSPAIKKGILQTVKVVDELVKVMGRHKPENIVIEMARENQTTQKGQKNSRERMKRIEEGIKELGSQILKEHPVENTQLQNEKLYLYYLQNGRDMYVDQELDINRLSDYDVDHIVPQSFLKDDSIDNKVLTRSDKNRGKSDNVPSEEVVKKMKNYWRQLLNAKLITQRKFDNLTKAERGGLSELDKAGFIKRQLVETRQITKHVAQILDSRMNTKYDENDKLIREVKVITLKSKLVSDFRKDFQFYKVREINNYHHAHDAYLNAVVGTALIKKYPKLESEFVYGDYKVYSSGSEVEFSHEYWMRHALTLAKRARDEREVPVGAVLVLNNRVIGEGWNRAIGLHDPTAHAEIMALRQGGLVMQNYRLIDATLYVTFEPCVMCAGAMIHSRIGRVVFGVRNAKTGAAGSLMDVLHYPGMNHRVEITEGILADECAALLCYFFRMPRQVFNAQKKAQSSTDGEIVWDKGRDFATVRKVLSMPQVNIVKKTEVQTGGFSKESILPKRNSDKLIARKKDWDPKKYGGFDSPTVAYSVLVVAKVEKGKSKKLKSVKELLGITIMERSSFEKNPIDFLEAKGYKEVKKDLIIKLPKYSLFELENGRKRMLASAGELQKGNELALPSKYVNFLYLASHYEKLKGSPEDNEQKQLFVEQHKHYLDEIIEQISEFSKRVILADANLDKVLSAYNKHRDKPIREQAENIIHLFTLTNLGAPAAFKYFDTTIDRKRYTSTKEVLDATLIHQSITGLYETRIDLSQLGGD

SEQ ID NO: 1346 - protein, 1554 aa, synthetic construct
MDKKYSIGLAIGTNSVGWAVITDEYKVPSKKFKVLGNTDRHSIKKNLIGALLFDSGETAEATRLKRTARRRYTRRKNRICYLQEIFSNEMAKVDDSFFHRLEESFLVEEDKKHERHPIFGNIVDEVAYHEKYPTIYHLRKKLVDSTDKADLRLIYLALAHMIKFRGHFLIEGDLNPDNSDVDKLFIQLVQTYNQLFEENPINASGVDAKAILSARLSKSRRLENLIAQLPGEKKNGLFGNLIALSLGLTPNFKSNFDLAEDAKLQLSKDTYDDDLDNLLAQIGDQYADLFLAAKNLSDAILLSDILRVNTEITKAPLSASMIKRYDEHHQDLTLLKALVRQQLPEKYKEIFFDQSKNGYAGYIDGGASQEEFYKFIKPILEKMDGTEELLVKLNREDLLRKQRTFDNGSIPHQIHLGELHAILRRQEDFYPFLKDNREKIEKILTFRIPYYVGPLARGNSRFAWMTRKSEETITPWNFEEVVDKGASAQSFIERMTNFDKNLPNEKVLPKHSLLYEYFTVYNELTKVKYVTEGMRKPAFLSGEQKKAIVDLLFKTNRKVTVKQLKEDYFKKIECFDSVEISGVEDRFNASLGTYHDLLKIIKDKDFLDNEENEDILEDIVLTLTLFEDREMIEERLKTYAHLFDDKVMKQLKRRRYTGWGRLSRKLINGIRDKQSGKTILDFLKSDGFANRNFMQLIHDDSLTFKEDIQKAQVSGQGDSLHEHIANLAGSPAIKKGILQTVKVVDELVKVMGRHKPENIVIEMARENQTTQKGQKNSRERMKRIEEGIKELGSQILKEHPVENTQLQNEKLYLYYLQNGRDMYVDQELDINRLSDYDVDHIVPQSFLKDDSIDNKVLTRSDKNRGKSDNVPSEEVVKKMKNYWRQLLNAKLITQRKFDNLTKAERGGLSELDKAGFIKRQLVETRQITKHVAQILDSRMNTKYDENDKLIREVKVITLKSKLVSDFRKDFQFYKVREINNYHHAHDAYLNAVVGTALIKKYPKLESEFVYGDYKVYDVRKMIAKSEQEIGKATAKYFFYSNIMNFFKTEITLANGEIRKRPLIETNMNHRVEITEGILADECAALLCYFFRMPRQVFNAQKKAQSSTDGSSGSETPGTSESATPESSGSEVEFSHEYWMRHALTLAKRARDEREVPVGAVLVLNNRVIGEGWNRAIGLHDPTAHAEIMALRQGGLVMQNYRLIDATLYVTFEPCVMCAGAMIHSRIGRVVFGVRNAKTGAAGSLMDVLHYPGGETGEIVWDKGRDFATVRKVLSMPQVNIVKKTEVQTGGFSKESILPKRNSDKLIARKKDWDPKKYGGFDSPTVAYSVLVVAKVEKGKSKKLKSVKELLGITIMERSSFEKNPIDFLEAKGYKEVKKDLIIKLPKYSLFELENGRKRMLASAGELQKGNELALPSKYVNFLYLASHYEKLKGSPEDNEQKQLFVEQHKHYLDEIIEQISEFSKRVILADANLDKVLSAYNKHRDKPIREQAENIIHLFTLTNLGAPAAFKYFDTTIDRKRYTSTKEVLDATLIHQSITGLYETRIDLSQLGGD

SEQ ID NO: 1347 - protein, 1554 aa, synthetic construct
MDKKYSIGLAIGTNSVGWAVITDEYKVPSKKFKVLGNTDRHSIKKNLIGALLFDSGETAEATRLKRTARRRYTRRKNRICYLQEIFSNEMAKVDDSFFHRLEESFLVEEDKKHERHPIFGNIVDEVAYHEKYPTIYHLRKKLVDSTDKADLRLIYLALAHMIKFRGHFLIEGDLNPDNSDVDKLFIQLVQTYNQLFEENPINASGVDAKAILSARLSKSRRLENLIAQLPGEKKNGLFGNLIALSLGLTPNFKSNFDLAEDAKLQLSKDTYDDDLDNLLAQIGDQYADLFLAAKNLSDAILLSDILRVNTEITKAPLSASMIKRYDEHHQDLTLLKALVRQQLPEKYKEIFFDQSKNGYAGYIDGGASQEEFYKFIKPILEKMDGTEELLVKLNREDLLRKQRTFDNGSIPHQIHLGELHAILRRQEDFYPFLKDNREKIEKILTFRIPYYVGPLARGNSRFAWMTRKSEETITPWNFEEVVDKGASAQSFIERMTNFDKNLPNEKVLPKHSLLYEYFTVYNELTKVKYVTEGMRKPAFLSGEQKKAIVDLLFKTNRKVTVKQLKEDYFKKIECFDSVEISGVEDRFNASLGTYHDLLKIIKDKDFLDNEENEDILEDIVLTLTLFEDREMIEERLKTYAHLFDDKVMKQLKRRRYTGWGRLSRKLINGIRDKQSGKTILDFLKSDGFANRNFMQLIHDDSGSSGSETPGTSESATPESSGSEVEFSHEYWMRHALTLAKRARDEREVPVGAVLVLNNRVIGEGWNRAIGLHDPTAHAEIMALRQGGLVMQNYRLIDATLYVTFEPCVMCAGAMIHSRIGRVVFGVRNAKTGAAGSLMDVLHYPGMNHRVEITEGILADECAALLCYFFRMPRQVFNAQKKAQSSTDLTFKEDIQKAQVSGQGDSLHEHIANLAGSPAIKKGILQTVKVVDELVKVMGRHKPENIVIEMARENQTTQKGQKNSRERMKRIEEGIKELGSQILKEHPVENTQLQNEKLYLYYLQNGRDMYVDQELDINRLSDYDVDHIVPQSFLKDDSIDNKVLTRSDKNRGKSDNVPSEEVVKKMKNYWRQLLNAKLITQRKFDNLTKAERGGLSELDKAGFIKRQLVETRQITKHVAQILDSRMNTKYDENDKLIREVKVITLKSKLVSDFRKDFQFYKVREINNYHHAHDAYLNAVVGTALIKKYPKLESEFVYGDYKVYDVRKMIAKSEQEIGKATAKYFFYSNIMNFFKTEITLANGEIRKRPLIETNGETGEIVWDKGRDFATVRKVLSMPQVNIVKKTEVQTGGFSKESILPKRNSDKLIARKKDWDPKKYGGFDSPTVAYSVLVVAKVEKGKSKKLKSVKELLGITIMERSSFEKNPIDFLEAKGYKEVKKDLIIKLPKYSLFELENGRKRMLASAGELQKGNELALPSKYVNFLYLASHYEKLKGSPEDNEQKQLFVEQHKHYLDEIIEQISEFSKRVILADANLDKVLSAYNKHRDKPIREQAENIIHLFTLTNLGAPAAFKYFDTTIDRKRYTSTKEVLDATLIHQSITGLYETRIDLSQLGGD

SEQ ID NO: 1348 - protein, 1554 aa, synthetic construct
MDKKYSIGLAIGTNSVGWAVITDEYKVPSKKFKVLGNTDRHSIKKNLIGALLFDSGETAEATRLKRTARRRYTRRKNRICYLQEIFSNEMAKVDDSFFHRLEESFLVEEDKKHERHPIFGNIVDEVAYHEKYPTIYHLRKKLVDSTDKADLRLIYLALAHMIKFRGHFLIEGDLNPDNSDVDKLFIQLVQTYNQLFEENPINASGVDAKAILSARLSKSRRLENLIAQLPGEKKNGLFGNLIALSLGLTPNFKSNFDLAEDAKLQLSKDTYDDDLDNLLAQIGDQYADLFLAAKNLSDAILLSDILRVNTEITKAPLSASMIKRYDEHHQDLTLLKALVRQQLPEKYKEIFFDQSKNGYAGYIDGGASQEEFYKFIKPILEKMDGTEELLVKLNREDLLRKQRTFDNGSIPHQIHLGELHAILRRQEDFYPFLKDNREKIEKILTFRIPYYVGPLARGNSRFAWMTRKSEETITPWNFEEVVDKGASAQSFIERMTNFDKNLPNEKVLPKHSLLYEYFTVYNELTKVKYVTEGMRKPAFLSGEQKKAIVDLLFKTNRKVTVKQLKEDYFKKIECFDSVEISGVEDRFNASLGTYHDLLKIIKDKDFLDNEENEDILEDIVLTLTLFEDREMIEERLKTYAHLFDDKVMKQLKRRRYTGWGRLSRKLINGIRDKQSGKTILDFLKSDGFANRNFMQLIHDDSLTFKEDIQKAQVSGQGDSLHEHIANLAGSPAIKKGILQTVKVVDELVKVMGRHKPENIVIEMARENQTTQKGQKNSRERMKRIEEGIKELGSQILKEHPVENTQLQNEKLYLYYLQNGRDMYVDQELDINRLSDYDVDHIVPQSFLKDDSIDNKVLTRSDKNRGKSDNVPSEEVVKKMKNYWRQLLNAKLITQRKFDNLTKAERGGLSELDKAGFIKRQLVETRQITKHVAQILDSRMNTKYDENDKLIREVKVITLKSKLVSDFRKDFQFYKVREINNYHHAHDAYLNAVVGTALIKKYPKLESEFVYGDYKVYDVRKMIAKSEQEIGKATAKYFFYSNIMNFFKTEITLANGEIRKRPLIETNGETGEIVWDKGRDFATVRKVLSMPQVNIVKKTEVQTGGFSKESILPKRNSDKLIARKKDWDPKKYGGFDSPTVAYSVLVVAKVEKGKSKKLKSVKELLGITIMERSSFEKNPIDFLEAKGYKEVKKDLIIKLPKYSLFELENGRKRMLASAGELQKGNELALPSKYVNFLYLASHYEKLKGSMNHRVEITEGILADECAALLCYFFRMPRQVFNAQKKAQSSTDGSSGSETPGTSESATPESSGSEVEFSHEYWMRHALTLAKRARDEREVPVGAVLVLNNRVIGEGWNRAIGLHDPTAHAEIMALRQGGLVMQNYRLIDATLYVTFEPCVMCAGAMIHSRIGRVVFGVRNAKTGAAGSLMDVLHYPGPEDNEQKQLFVEQHKHYLDEIIEQISEFSKRVILADANLDKVLSAYNKHRDKPIREQAENIIHLFTLTNLGAPAAFKYFDTTIDRKRYTSTKEVLDATLIHQSITGLYETRIDLSQLGGD

SEQ ID NO: 1349 - protein, 1554 aa, synthetic construct
MDKKYSIGLAIGTNSVGWAVITDEYKVPSKKFKVLGNTDRHSIKKNLIGALLFDSGETAEATRLKRTARRRYTRRKNRICYLQEIFSNEMAKVDDSFFHRLEESFLVEEDKKHERHPIFGNIVDEVAYHEKYPTIYHLRKKLVDSTDKADLRLIYLALAHMIKFRGHFLIEGDLNPDNSDVDKLFIQLVQTYNQLFEENPINASGVDAKAILSARLSKSRRLENLIAQLPGEKKNGLFGNLIALSLGLTPNFKSNFDLAEDAKLQLSKDTYDDDLDNLLAQIGDQYADLFLAAKNLSDAILLSDILRVNTEITKAPLSASMIKRYDEHHQDLTLLKALVRQQLPEKYKEIFFDQSKNGYAGYIDGGASQEEFYKFIKPILEKMDGTEELLVKLNREDLLRKQRTFDNGSIPHQIHLGELHAILRRQEDFYPFLKDNREKIEKILTFRIPYYVGPLARGNSRFAWMTRKSEETITPWNFEEVVDKGASAQSFIERMTNFDKNLPNEKVLPKHSLLYEYFTVYNELTKVKYVTEGMRKPAFLSGEQKKAIVDLLFKTNRKVTVKQLKEDYFKKIECFDSVEISGVEDRFNASLGTYHDLLKIIKDKDFLDNEENEDILEDIVLTLTLFEDREMIEERLKTYAHLFDDKVMKQLKRRRYTGWGRLSRKLINGIRDKQSGKTILDFLKSDGFANRNFMQLIHDDSLTFKEDIQKAQVSGQGDSLHEHIANLAGSPAIKKGILQTVKVVDELVKVMGRHKPENIVIEMARENQTTQKGQKNSRERMKRIEEGIKELGSQILKEHPVENTQLQNEKLYLYYLQNGRDMYVDQELDINRLSDYDVDHIVPQSFLKDDSIDNKVLTRSDKNRGKSDNVPSEEVVKKMKNYWRQLLNAKLITQRKFDNLTKAERGGLSELDKAGFIKRQLVETRQITKHVAQILDSRMNTKYDENDKLIREVKVITLKSKLVSDFRKDFQFYKVREINNYHHAHDAYLNAVVGTALIKKYPKLESEFVYGDYKVYDVRKMIAKSEQEIGKATAKYFFYSNIMNFFKTEITLAMNHRVEITEGILADECAALLCYFFRMPRQVFNAQKKAQSSTDGSSGSETPGTSESATPESSGSEVEFSHEYWMRHALTLAKRARDEREVPVGAVLVLNNRVIGEGWNRAIGLHDPTAHAEIMALRQGGLVMQNYRLIDATLYVTFEPCVMCAGAMIHSRIGRVVFGVRNAKTGAAGSLMDVLHYPGNGEIRKRPLIETNGETGEIVWDKGRDFATVRKVLSMPQVNIVKKTEVQTGGFSKESILPKRNSDKLIARKKDWDPKKYGGFDSPTVAYSVLVVAKVEKGKSKKLKSVKELLGITIMERSSFEKNPIDFLEAKGYKEVKKDLIIKLPKYSLFELENGRKRMLASAGELQKGNELALPSKYVNFLYLASHYEKLKGSPEDNEQKQLFVEQHKHYLDEIIEQISEFSKRVILADANLDKVLSAYNKHRDKPIREQAENIIHLFTLTNLGAPAAFKYFDTTIDRKRYTSTKEVLDATLIHQSITGLYETRIDLSQLGGD

SEQ ID NO: 1350 - protein, 1554 aa, synthetic construct
MDKKYSIGLAIGTNSVGWAVITDEYKVPSKKFKVLGNTDRHSIKKNLIGALLFDSGETAEATRLKRTARRRYTRRKNRICYLQEIFSNEMAKVDDSFFHRLEESFLVEEDKKHERHPIFGNIVDEVAYHEKYPTIYHLRKKLVDSTDKADLRLIYLALAHMIKFRGHFLIEGDLNPDNSDVDKLFIQLVQTYNQLFEENPINASGVDAKAILSARLSKSRRLENLIAQLPGEKKNGLFGNLIALSLGLTPNFKSNFDLAEDAKLQLSKDTYDDDLDNLLAQIGDQYADLFLAAKNLSDAILLSDILRVNTEITKAPLSASMIKRYDEHHQDLTLLKALVRQQLPEKYKEIFFDQSKNGYAGYIDGGASQEEFYKFIKPILEKMDGTEELLVKLNREDLLRKQRTFDNGSIPHQIHLGELHAILRRQEDFYPFLKDNREKIEKILTFRIPYYVGPLARGNSRFAWMTRKSEETITPWNFEEVVDKGASAQSFIERMTNFDKNLPNEKVLPKHSLLYEYFTVYNELTKVKYVTEGMRKPAFLSGEQKKAIVDLLFKTNRKVTVKQLKEDYFKKIECFDSVEISGVEDRFNASLGTYHDLLKIIKDKDFLDNEENEDILEDIVLTLTLFEDREMIEERLKTYAHLFDDKVMKQLKRRRYTGWGRLSRKLINGIRDKQSGKTILDFLKSDGFANRNFMQLIHDDSLTFKEDIQKAQVSGQGDSLHEHIANLAGSPAIKKGILQTVKVVDELVKVMGRHKPENIVIEMARENQTTQKGQKNSRERMKRIEEGIKELGSQILKEHPVENTQLQNEKLYLYYLQNGRDMYVDQELDINRLSDYDVDHIVPQSFLKDDSIDNKVLTRSDKNRGKSDNVPSEEVVKKMKNYWRQLLNAKLITQRKFDNLTKAERGGLSELDKAGFIKRQLVETRQITKHVAQILDSRMNTKYDENDKLIREVKVITLKSKLVSDFRKDFQFYKVREINNYHHAHDAYLNAVVGTALIKKYPKLESEFVYGDYKVYDVRKMIAKSEQEIGKATAKYFFYSMNHRVEITEGILADECAALLCYFFRMPRQVFNAQKKAQSSTDGSSGSETPGTSESATPESSGSEVEFSHEYWMRHALTLAKRARDEREVPVGAVLVLNNRVIGEGWNRAIGLHDPTAHAEIMALRQGGLVMQNYRLIDATLYVTFEPCVMCAGAMIHSRIGRVVFGVRNAKTGAAGSLMDVLHYPGNIMNFFKTEITLANGEIRKRPLIETNGETGEIVWDKGRDFATVRKVLSMPQVNIVKKTEVQTGGFSKESILPKRNSDKLIARKKDWDPKKYGGFDSPTVAYSVLVVAKVEKGKSKKLKSVKELLGITIMERSSFEKNPIDFLEAKGYKEVKKDLIIKLPKYSLFELENGRKRMLASAGELQKGNELALPSKYVNFLYLASHYEKLKGSPEDNEQKQLFVEQHKHYLDEIIEQISEFSKRVILADANLDKVLSAYNKHRDKPIREQAENIIHLFTLTNLGAPAAFKYFDTTIDRKRYTSTKEVLDATLIHQSITGLYETRIDLSQLGGD

SEQ ID NO: 1351 - protein, 1554 aa, synthetic construct
MDKKYSIGLAIGTNSVGWAVITDEYKVPSKKFKVLGNTDRHSIKKNLIGALLFDSGETAEATRLKRTARRRYTRRKNRICYLQEIFSNEMAKVDDSFFHRLEESFLVEEDKKHERHPIFGNIVDEVAYHEKYPTIYHLRKKLVDSTDKADLRLIYLALAHMIKFRGHFLIEGDLNPDNSDVDKLFIQLVQTYNQLFEENPINASGVDAKAILSARLSKSRRLENLIAQLPGEKKNGLFGNLIALSLGLTPNFKSNFDLAEDAKLQLSKDTYDDDLDNLLAQIGDQYADLFLAAKNLSDAILLSDILRVNTEITKAPLSASMIKRYDEHHQDLTLLKALVRQQLPEKYKEIFFDQSKNGYAGYIDGGASQEEFYKFIKPILEKMDGTEELLVKLNREDLLRKQRTFDNGSIPHQIHLGELHAILRRQEDFYPFLKDNREKIEKILTFRIPYYVGPLARGNSRFAWMTRKSEETITPWNFEEVVDKGASAQSFIERMTNFDKNLPNEKVLPKHSLLYEYFTVYNELTKVKYVTEGMRKPAFLSGEQKKAIVDLLFKTNRKVTVKQLKEDYFKKIECFDSVEISGVEDRFNASLGTYHDLLKIIKDKDFLDNEENEDILEDIVLTLTLFEDREMIEERLKTYAHLFDDKVMKQLKRRRYTGWGRLSRKLINGIRDKQSGKTILDFLKSDGFANRNFMQLIHDDSLTFKEDIQKAQVSGQGDSLHEHIANLAGSPAIKKGILQTVKVVDELVKVMGRHKPENIVIEMARENQTTQKGQKNSRERMKRIEEGIKELGSQILKEHPVENTQLQNEKLYLYYLQNGRDMYVDQELDINRLSDYDVDHIVPQSFLKDDSIDNKVLTRSDKNRGKSDNVPSEEVVKKMKNYWRQLLNAKLITQRKFDNLTKAERGGLSELDKAGFIKRQLVETRQITKHVAQILDSRMNTKYDENDKLIREVKVITLKSKLVSDFRKDFQFYKVREINNYHHAHDAYLNAVVGTALIKKYPKLESEFVYGDYKVYDVRKMIAKSEQEIGKATAKYFFYSNIMNFFKTEITLANGEIRKRPLIETNGETGEIVWDKGRDFATVRKVLSMPQVNIVKKTEVQTGGFSKESILPKRNSDKLIARKKDWDPKKYGGFDSPTVAYSVLVVAKVEKGKSKKLKSVKELLGITIMERSSFEKNPIDFLEAKGYKEVKKDLIIKLPKYSLFELENGRKRMLASAGELQKGNELALPSKYVNFLYLASHYEKLKGSPEDNEQKQLFVEQHKHYLDEIIEQISEFSKRVILADANLDKVLSAYNKHRMNHRVEITEGILADECAALLCYFFRMPRQVFNAQKKAQSSTDGSSGSETPGTSESATPESSGSEVEFSHEYWMRHALTLAKRARDEREVPVGAVLVLNNRVIGEGWNRAIGLHDPTAHAEIMALRQGGLVMQNYRLIDATLYVTFEPCVMCAGAMIHSRIGRVVFGVRNAKTGAAGSLMDVLHYPGDKPIREQAENIIHLFTLTNLGAPAAFKYFDTTIDRKRYTSTKEVLDATLIHQSITGLYETRIDLSQLGGD

SEQ ID NO: 1352 - protein, 1454 aa, synthetic construct
MDKKYSIGLAIGTNSVGWAVITDEYKVPSKKFKVLGNTDRHSIKKNLIGALLFDSGETAEATRLKRTARRRYTRRKNRICYLQEIFSNEMAKVDDSFFHRLEESFLVEEDKKHERHPIFGNIVDEVAYHEKYPTIYHLRKKLVDSTDKADLRLIYLALAHMIKFRGHFLIEGDLNPDNSDVDKLFIQLVQTYNQLFEENPINASGVDAKAILSARLSKSRRLENLIAQLPGEKKNGLFGNLIALSLGLTPNFKSNFDLAEDAKLQLSKDTYDDDLDNLLAQIGDQYADLFLAAKNLSDAILLSDILRVNTEITKAPLSASMIKRYDEHHQDLTLLKALVRQQLPEKYKEIFFDQSKNGYAGYIDGGASQEEFYKFIKPILEKMDGTEELLVKLNREDLLRKQRTFDNGSIPHQIHLGELHAILRRQEDFYPFLKDNREKIEKILTFRIPYYVGPLARGNSRFAWMTRKSEETITPWNFEEVVDKGASAQSFIERMTNFDKNLPNEKVLPKHSLLYEYFTVYNELTKVKYVTEGMRKPAFLSGEQKKAIVDLLFKTNRKVTVKQLKEDYFKKIECFDSVEISGVEDRFNASLGTYHDLLKIIKDKDFLDNEENEDILEDIVLTLTLFEDREMIEERLKTYAHLFDDKVMKQLKRRRYTGWGRLSRKLINGIRDKQSGKTILDFLKSDGFANRNFMQLIHDDSLTFKEDIQKAQVSGQGDSLHEHIANLAGSPAIKKGILQTVKVVDELVKVMGRHKPENIVIEMARENQTTQKGQKNSRERMKRIEEGIKELGSEVEFSHEYWMRHALTLAKRARDEREVPVGAVLVLNNRVIGEGWNRAIGLHDPTAHAEIMALRQGGLVMQNYRLIDATLYVTFEPCVMCAGAMIHSRIGRVVFGVRNAKTGAAGSLMDVLHYPGMNHRVEITEGILADECAALLCYFFRMPRQVFNAQKKAQSSTDEEVVKKMKNYWRQLLNAKLITQRKFDNLTKAERGGLSELDKAGFIKRQLVETRQITKHVAQILDSRMNTKYDENDKLIREVKVITLKSKLVSDFRKDFQFYKVREINNYHHAHDAYLNAVVGTALIKKYPKLESEFVYGDYKVYDVRKMIAKSEQEIGKATAKYFFYSNIMNFFKTEITLANGEIRKRPLIETNGETGEIVWDKGRDFATVRKVLSMPQVNIVKKTEVQTGGFSKESILPKRNSDKLIARKKDWDPKKYGGFDSPTVAYSVLVVAKVEKGKSKKLKSVKELLGITIMERSSFEKNPIDFLEAKGYKEVKKDLIIKLPKYSLFELENGRKRMLASAGELQKGNELALPSKYVNFLYLASHYEKLKGSPEDNEQKQLFVEQHKHYLDEIIEQISEFSKRVILADANLDKVLSAYNKHRDKPIREQAENIIHLFTLTNLGAPAAFKYFDTTIDRKRYTSTKEVLDATLIHQSITGLYETRIDLSQLGGD

SEQ ID NO: 1353 - protein, 1420 aa, synthetic construct
MDKKYSIGLAIGTNSVGWAVITDEYKVPSKKFKVLGNTDRHSIKKNLIGALLFDSGETAEATRLKRTARRRYTRRKNRICYLQEIFSNEMAKVDDSFFHRLEESFLVEEDKKHERHPIFGNIVDEVAYHEKYPTIYHLRKKLVDSTDKADLRLIYLALAHMIKFRGHFLIEGDLNPDNSDVDKLFIQLVQTYNQLFEENPINASGVDAKAILSARLSKSRRLENLIAQLPGEKKNGLFGNLIALSLGLTPNFKSNFDLAEDAKLQLSKDTYDDDLDNLLAQIGDQYADLFLAAKNLSDAILLSDILRVNTEITKAPLSASMIKRYDEHHQDLTLLKALVRQQLPEKYKEIFFDQSKNGYAGYIDGGASQEEFYKFIKPILEKMDGTEELLVKLNREDLLRKQRTFDNGSIPHQIHLGELHAILRRQEDFYPFLKDNREKIEKILTFRIPYYVGPLARGNSRFAWMTRKSEETITPWNFEEVVDKGASAQSFIERMTNFDKNLPNEKVLPKHSLLYEYFTVYNELTKVKYVTEGMRKPAFLSGEQKKAIVDLLFKTNRKVTVKQLKEDYFKKIECFDSVEISGVEDRFNASLGTYHDLLKIIKDKDFLDNEENEDILEDIVLTLTLFEDREMIEERLKTYAHLFDDKVMKQLKRRRYTGWGRLSRKLINGIRDKQSGKTILDFLKSDGFANRNFMQLIHDDSLTFKEDIQKAQVSGQGDSLHEHIANLAGSPAIKKGILQTVKVVDELVKVMGRHKPENIVIEMARENQTTQKGQKNSRERMKRIEEGIKELGSEVEFSHEYWMRHALTLAKRARDEREVPVGAVLVLNNRVIGEGWNRAIGLHDPTAHAEIMALRQGGLVMQNYRLIDATLYVTFEPCVMCAGAMIHSRIGRVVFGVRNAKTGAAGSLMDVLHYPGMNHRVEITEGILADECAALLCYFFRMPRQVFNAQKKAQSSTDGLSELDKAGFIKRQLVETRQITKHVAQILDSRMNTKYDENDKLIREVKVITLKSKLVSDFRKDFQFYKVREINNYHHAHDAYLNAVVGTALIKKYPKLESEFVYGDYKVYDVRKMIAKSEQEIGKATAKYFFYSNIMNFFKTEITLANGEIRKRPLIETNGETGEIVWDKGRDFATVRKVLSMPQVNIVKKTEVQTGGFSKESILPKRNSDKLIARKKDWDPKKYGGFDSPTVAYSVLVVAKVEKGKSKKLKSVKELLGITIMERSSFEKNPIDFLEAKGYKEVKKDLIIKLPKYSLFELENGRKRMLASAGELQKGNELALPSKYVNFLYLASHYEKLKGSPEDNEQKQLFVEQHKHYLDEIIEQISEFSKRVILADANLDKVLSAYNKHRDKPIREQAENIIHLFTLTNLGAPAAFKYFDTTIDRKRYTSTKEVLDATLIHQSITGLYETRIDLSQLGGD

SEQ ID NO: 1354 - protein, 1554 aa, synthetic construct
MDKKYSIGLAIGTNSVGWAVITDEYKVPSKKFKVLGNTDRHSIKKNLIGALLFDSGETAEATRLKRTARRRYTRRKNRICYLQEIFSNEMAKVDDSFFHRLEESFLVEEDKKHERHPIFGNIVDEVAYHEKYPTIYHLRKKLVDSTDKADLRLIYLALAHMIKFRGHFLIEGDLNPDNSDVDKLFIQLVQTYNQLFEENPINASGVDAKAILSARLSKSRRLENLIAQLPGEKKNGLFGNLIALSLGLTPNFKSNFDLAEDAKLQLSKDTYDDDLDNLLAQIGDQYADLFLAAKNLSDAILLSDILRVNTEITKAPLSASMIKRYDEHHQDLTLLKALVRQQLPEKYKEIFFDQSKNGYAGYIDGGASQEEFYKFIKPILEKMDGTEELLVKLNREDLLRKQRTFDNGSIPHQIHLGELHAILRRQEDFYPFLKDNREKIEKILTFRIPYYVGPLARGNSRFAWMTRKSEETITPWNFEEVVDKGASAQSFIERMTNFDKNLPNEKVLPKHSLLYEYFTVYNELTKVKYVTEGMRKPAFLSGEQKKAIVDLLFKTNRKVTVKQLKEDYFKKIECFDSVEISGVEDRFNASLGTYHDLLKIIKDKDFLDNEENEDILEDIVLTLTLFEDREMIEERLKTYAHLFDDKVMKQLKRRRYTGWGRLSRKLINGIRDKQSGKTILDFLKSDGFANRNFMQLIHDDSLTFKEDIQKAQVSGQGDSLHEHIANLAGSPAIKKGILQTVKVVDELVKVMGRHKPENIVIEMARENQTTQKGQKNSRERMKRIEEGIKELGSQILKEHPVENTQLQNEKLYLYYLQNGRDMYVDQELDINRLSDYDVDHIVPQSFLKDDSIDNKVLTRSDKNRGKSDNVPSEEVVKKMKNYWRQLLNAKLITQRKFDNLTKAERGGLSELDKAGFIKRQLVETRQITKHVAQILDSRMNTKYDENDKLIREVKVITLKSKLVSDFRKDFQFYKVREINNYHHAHDAYLNAVVGTALIKKYPKTAHAEIMALRQGGLVMQNYRLIDATLYVTFEPCVMCAGAMIHSRIGRVVFGVRNAKTGAAGSLMDVLHYPGMNHRVEITEGILADECAALLCYFFRMPRQVFNAQKKAQSSTDGSSGSETPGTSESATPESSGSEVEFSHEYWMRHALTLAKRARDEREVPVGAVLVLNNRVIGEGWNRAIGLHDPLESEFVYGDYKVYDVRKMIAKSEQEIGKATAKYFFYSNIMNFFKTEITLANGEIRKRPLIETNGETGEIVWDKGRDFATVRKVLSMPQVNIVKKTEVQTGGFSKESILPKRNSDKLIARKKDWDPKKYGGFDSPTVAYSVLVVAKVEKGKSKKLKSVKELLGITIMERSSFEKNPIDFLEAKGYKEVKKDLIIKLPKYSLFELENGRKRMLASAGELQKGNELALPSKYVNFLYLASHYEKLKGSPEDNEQKQLFVEQHKHYLDEIIEQISEFSKRVILADANLDKVLSAYNKHRDKPIREQAENIIHLFTLTNLGAPAAFKYFDTTIDRKRYTSTKEVLDATLIHQSITGLYETRIDLSQLGGD

SEQ ID NO: 1355 - protein, 1554 aa, synthetic construct
MDKKYSIGLAIGTNSVGWAVITDEYKVPSKKFKVLGNTDRHSIKKNLIGALLFDSGETAEATRLKRTARRRYTRRKNRICYLQEIFSNEMAKVDDSFFHRLEESFLVEEDKKHERHPIFGNIVDEVAYHEKYPTIYHLRKKLVDSTDKADLRLIYLALAHMIKFRGHFLIEGDLNPDNSDVDKLFIQLVQTYNQLFEENPINASGVDAKAILSARLSKSRRLENLIAQLPGEKKNGLFGNLIALSLGLTPNFKSNFDLAEDAKLQLSKDTYDDDLDNLLAQIGDQYADLFLAAKNLSDAILLSDILRVNTEITKAPLSASMIKRYDEHHQDLTLLKALVRQQLPEKYKEIFFDQSKNGYAGYIDGGASQEEFYKFIKPILEKMDGTEELLVKLNREDLLRKQRTFDNGSIPHQIHLGELHAILRRQEDFYPFLKDNREKIEKILTFRIPYYVGPLARGNSRFAWMTRKSEETITPWNFEEVVDKGASAQSFIERMTNFDKNLPNEKVLPKHSLLYEYFTVYNELTKVKYVTEGMRKPAFLSGEQKKAIVDLLFKTNRKVTVKQLKEDYFKKIECFDSVEISGVEDRFNASLGTYHDLLKIIKDKDFLDNEENEDILEDIVLTLTLFEDREMIEERLKTYAHLFDDKVMKQLKRRRYTGWGRLSRKLINGIRDKQSGKTILDFLKSDGFANRNFMQLIHDDSLTFKEDIQKAQVSGQGDSLHEHIANLAGSPAIKKGILQTVKVVDELVKVMGRHKPENIVIEMARENQTTQKGQKNSRERMKRIEEGIKELGSQILKEHPVENTQLQNEKLYLYYLQNGRDMYVDQELDINRLSDYDVDHIVPQSFLKDDSIDNKVLTRSDKNRGKSDNVPSEEVVKKMKNYWRQLLNAKLITQRKFDNLTKAERGGLSELDKAGFIKRQLVETRQITKHVAQILDSRMNTKYDENDKLIREVKVITLKSKLVSDFRKDFQFYKVREINNYHHAHDAYLNAVVGTALIKKYPKLESEFVYGDYKVTAHAEIMALRQGGLVMQNYRLIDATLYVTFEPCVMCAGAMIHSRIGRVVFGVRNAKTGAAGSLMDVLHYPGMNHRVEITEGILADECAALLCYFFRMPRQVFNAQKKAQSSTDGSSGSETPGTSESATPESSGSEVEFSHEYWMRHALTLAKRARDEREVPVGAVLVLNNRVIGEGWNRAIGLHDPYDVRKMIAKSEQEIGKATAKYFFYSNIMNFFKTEITLANGEIRKRPLIETNGETGEIVWDKGRDFATVRKVLSMPQVNIVKKTEVQTGGFSKESILPKRNSDKLIARKKDWDPKKYGGFDSPTVAYSVLVVAKVEKGKSKKLKSVKELLGITIMERSSFEKNPIDFLEAKGYKEVKKDLIIKLPKYSLFELENGRKRMLASAGELQKGNELALPSKYVNFLYLASHYEKLKGSPEDNEQKQLFVEQHKHYLDEIIEQISEFSKRVILADANLDKVLSAYNKHRDKPIREQAENIIHLFTLTNLGAPAAFKYFDTTIDRKRYTSTKEVLDATLIHQSITGLYETRIDLSQLGGD

SEQ ID NO: 1356 - protein, 1554 aa, synthetic construct
MDKKYSIGLAIGTNSVGWAVITDEYKVPSKKFKVLGNTDRHSIKKNLIGALLFDSGETAEATRLKRTARRRYTRRKNRICYLQEIFSNEMAKVDDSFFHRLEESFLVEEDKKHERHPIFGNIVDEVAYHEKYPTIYHLRKKLVDSTDKADLRLIYLALAHMIKFRGHFLIEGDLNPDNSDVDKLFIQLVQTYNQLFEENPINASGVDAKAILSARLSKSRRLENLIAQLPGEKKNGLFGNLIALSLGLTPNFKSNFDLAEDAKLQLSKDTYDDDLDNLLAQIGDQYADLFLAAKNLSDAILLSDILRVNTEITKAPLSASMIKRYDEHHQDLTLLKALVRQQLPEKYKEIFFDQSKNGYAGYIDGGASQEEFYKFIKPILEKMDGTEELLVKLNREDLLRKQRTFDNGSIPHQIHLGELHAILRRQEDFYPFLKDNREKIEKILTFRIPYYVGPLARGNSRFAWMTRKSEETITPWNFEEVVDKGASAQSFIERMTNFDKNLPNEKVLPKHSLLYEYFTVYNELTKVKYVTEGMRKPAFLSGEQKKAIVDLLFKTNRKVTVKQLKEDYFKKIECFDSVEISGVEDRFNASLGTYHDLLKIIKDKDFLDNEENEDILEDIVLTLTLFEDREMIEERLKTYAHLFDDKVMKQLKRRRYTGWGRLSRKLINGIRDKQSGKTILDFLKSDGFANRNFMQLIHDDSLTFKEDIQKAQVSGQGDSLHEHIANLAGSPAIKKGILQTVKVVDELVKVMGRHKPENIVIEMARENQTTQKGQKNSRERMKRIEEGIKELGSQILKEHPVENTQLQNEKLYLYYLQNGRDMYVDQELDINRLSDYDVDHIVPQSFLKDDSIDNKVLTRSDKNRGKSDNVPSEEVVKKMKNYWRQLLNAKLITQRKFDNLTKAERGGLSELDKAGFIKRQLVETRQITKHVAQILDSRMNTKYDENDKLIREVKVITLKSKLVSDFRKDFQFYKVREINNYHHAHDAYLNAVVGTALIKKYPKLESEFVYGDYKVYDVRKMITAHAEIMALRQGGLVMQNYRLIDATLYVTFEPCVMCAGAMIHSRIGRVVFGVRNAKTGAAGSLMDVLHYPGMNHRVEITEGILADECAALLCYFFRMPRQVFNAQKKAQSSTDGSSGSETPGTSESATPESSGSEVEFSHEYWMRHALTLAKRARDEREVPVGAVLVLNNRVIGEGWNRAIGLHDPAKSEQEIGKATAKYFFYSNIMNFFKTEITLANGEIRKRPLIETNGETGEIVWDKGRDFATVRKVLSMPQVNIVKKTEVQTGGFSKESILPKRNSDKLIARKKDWDPKKYGGFDSPTVAYSVLVVAKVEKGKSKKLKSVKELLGITIMERSSFEKNPIDFLEAKGYKEVKKDLIIKLPKYSLFELENGRKRMLASAGELQKGNELALPSKYVNFLYLASHYEKLKGSPEDNEQKQLFVEQHKHYLDEIIEQISEFSKRVILADANLDKVLSAYNKHRDKPIREQAENIIHLFTLTNLGAPAAFKYFDTTIDRKRYTSTKEVLDATLIHQSITGLYETRIDLSQLGGD

SEQ ID NO: 1357 - protein, 1554 aa, synthetic construct
MDKKYSIGLAIGTNSVGWAVITDEYKVPSKKFKVLGNTDRHSIKKNLIGALLFDSGETAEATRLKRTARRRYTRRKNRICYLQEIFSNEMAKVDDSFFHRLEESFLVEEDKKHERHPIFGNIVDEVAYHEKYPTIYHLRKKLVDSTDKADLRLIYLALAHMIKFRGHFLIEGDLNPDNSDVDKLFIQLVQTYNQLFEENPINASGVDAKAILSARLSKSRRLENLIAQLPGEKKNGLFGNLIALSLGLTPNFKSNFDLAEDAKLQLSKDTYDDDLDNLLAQIGDQYADLFLAAKNLSDAILLSDILRVNTEITKAPLSASMIKRYDEHHQDLTLLKALVRQQLPEKYKEIFFDQSKNGYAGYIDGGASQEEFYKFIKPILEKMDGTEELLVKLNREDLLRKQRTFDNGSIPHQIHLGELHAILRRQEDFYPFLKDNREKIEKILTFRIPYYVGPLARGNSRFAWMTRKSEETITPWNFEEVVDKGASAQSFIERMTNFDKNLPNEKVLPKHSLLYEYFTVYNELTKVKYVTEGMRKPAFLSGEQKKAIVDLLFKTNRKVTVKQLKEDYFKKIECFDSVEISGVEDRFNASLGTYHDLLKIIKDKDFLDNEENEDILEDIVLTLTLFEDREMIEERLKTYAHLFDDKVMKQLKRRRYTGWGRLSRKLINGIRDKQSGKTILDFLKSDGFANRNFMQLIHDDSLTFKEDIQKAQVSGQGDSLHEHIANLAGSPAIKKGILQTVKVVDELVKVMGRHKPENIVIEMARENQTTQKGQKNSRERMKRIEEGIKELGSQILKEHPVENTQLQNEKLYLYYLQNGRDMYVDQELDINRLSDYDVDHIVPQSFLKDDSIDNKVLTRSDKNRGKSDNVPSEEVVKKMKNYWRQLLNAKLITQRKFDNLTKAERGGLSELDKAGFIKRQLVETRQITKHVAQILDSRMNTKYDENDKLIREVKVITLKSKLVSDFRKDFQFYKVREINNYHHAHDAYLNAVVGTALIKKYPKLESEFVYGDYKVYDVRKMIAKSEQEITAHAEIMALRQGGLVMQNYRLIDATLYVTFEPCVMCAGAMIHSRIGRVVFGVRNAKTGAAGSLMDVLHYPGMNHRVEITEGILADECAALLCYFFRMPRQVFNAQKKAQSSTDGSSGSETPGTSESATPESSGSEVEFSHEYWMRHALTLAKRARDEREVPVGAVLVLNNRVIGEGWNRAIGLHDPGKATAKYFFYSNIMNFFKTEITLANGEIRKRPLIETNGETGEIVWDKGRDFATVRKVLSMPQVNIVKKTEVQTGGFSKESILPKRNSDKLIARKKDWDPKKYGGFDSPTVAYSVLVVAKVEKGKSKKLKSVKELLGITIMERSSFEKNPIDFLEAKGYKEVKKDLIIKLPKYSLFELENGRKRMLASAGELQKGNELALPSKYVNFLYLASHYEKLKGSPEDNEQKQLFVEQHKHYLDEIIEQISEFSKRVILADANLDKVLSAYNKHRDKPIREQAENIIHLFTLTNLGAPAAFKYFDTTIDRKRYTSTKEVLDATLIHQSITGLYETRIDLSQLGGD

SEQ ID NO: 1358 - protein, 1554 aa, synthetic construct
MDKKYSIGLAIGTNSVGWAVITDEYKVPSKKFKVLGNTDRHSIKKNLIGALLFDSGETAEATRLKRTARRRYTRRKNRICYLQEIFSNEMAKVDDSFFHRLEESFLVEEDKKHERHPIFGNIVDEVAYHEKYPTIYHLRKKLVDSTDKADLRLIYLALAHMIKFRGHFLIEGDLNPDNSDVDKLFIQLVQTYNQLFEENPINASGVDAKAILSARLSKSRRLENLIAQLPGEKKNGLFGNLIALSLGLTPNFKSNFDLAEDAKLQLSKDTYDDDLDNLLAQIGDQYADLFLAAKNLSDAILLSDILRVNTEITKAPLSASMIKRYDEHHQDLTLLKALVRQQLPEKYKEIFFDQSKNGYAGYIDGGASQEEFYKFIKPILEKMDGTEELLVKLNREDLLRKQRTFDNGSIPHQIHLGELHAILRRQEDFYPFLKDNREKIEKILTFRIPYYVGPLARGNSRFAWMTRKSEETITPWNFEEVVDKGASAQSFIERMTNFDKNLPNEKVLPKHSLLYEYFTVYNELTKVKYVTEGMRKPAFLSGEQKKAIVDLLFKTNRKVTVKQLKEDYFKKIECFDSVEISGVEDRFNASLGTYHDLLKIIKDKDFLDNEENEDILEDIVLTLTLFEDREMIEERLKTYAHLFDDKVMKQLKRRRYTGWGRLSRKLINGIRDKQSGKTILDFLKSDGFANRNFMQLIHDDSLTFKEDIQKAQVSGQGDSLHEHIANLAGSPAIKKGILQTVKVVDELVKVMGRHKPENIVIEMARENQTTQKGQKNSRERMKRIEEGIKELGSQILKEHPVENTQLQNEKLYLYYLQNGRDMYVDQELDINRLSDYDVDHIVPQSFLKDDSIDNKVLTRSDKNRGKSDNVPSEEVVKKMKNYWRQLLNAKLITQRKFDNLTKAERGGLSELDKAGFIKRQLVETRQITKHVAQILDSRMNTKYDENDKLIREVKVITLKSKLVSDFRKDFQFYKVREINNYHHAHDAYLNAVVGTALIKKYPKLESEFVYGDYKVYDVRKMIAKSEQEIGKATAKYFFYSTAHAEIMALRQGGLVMQNYRLIDATLYVTFEPCVMCAGAMIHSRIGRVVFGVRNAKTGAAGSLMDVLHYPGMNHRVEITEGILADECAALLCYFFRMPRQVFNAQKKAQSSTDGSSGSETPGTSESATPESSGSEVEFSHEYWMRHALTLAKRARDEREVPVGAVLVLNNRVIGEGWNRAIGLHDPNIMNFFKTEITLANGEIRKRPLIETNGETGEIVWDKGRDFATVRKVLSMPQVNIVKKTEVQTGGFSKESILPKRNSDKLIARKKDWDPKKYGGFDSPTVAYSVLVVAKVEKGKSKKLKSVKELLGITIMERSSFEKNPIDFLEAKGYKEVKKDLIIKLPKYSLFELENGRKRMLASAGELQKGNELALPSKYVNFLYLASHYEKLKGSPEDNEQKQLFVEQHKHYLDEIIEQISEFSKRVILADANLDKVLSAYNKHRDKPIREQAENIIHLFTLTNLGAPAAFKYFDTTIDRKRYTSTKEVLDATLIHQSITGLYETRIDLSQLGGD

SEQ ID NO: 1359 - protein, 1554 aa, synthetic construct
MDKKYSIGLAIGTNSVGWAVITDEYKVPSKKFKVLGNTDRHSIKKNLIGALLFDSGETAEATRLKRTARRRYTRRKNRICYLQEIFSNEMAKVDDSFFHRLEESFLVEEDKKHERHPIFGNIVDEVAYHEKYPTIYHLRKKLVDSTDKADLRLIYLALAHMIKFRGHFLIEGDLNPDNSDVDKLFIQLVQTYNQLFEENPINASGVDAKAILSARLSKSRRLENLIAQLPGEKKNGLFGNLIALSLGLTPNFKSNFDLAEDAKLQLSKDTYDDDLDNLLAQIGDQYADLFLAAKNLSDAILLSDILRVNTEITKAPLSASMIKRYDEHHQDLTLLKALVRQQLPEKYKEIFFDQSKNGYAGYIDGGASQEEFYKFIKPILEKMDGTEELLVKLNREDLLRKQRTFDNGSIPHQIHLGELHAILRRQEDFYPFLKDNREKIEKILTFRIPYYVGPLARGNSRFAWMTRKSEETITPWNFEEVVDKGASAQSFIERMTNFDKNLPNEKVLPKHSLLYEYFTVYNELTKVKYVTEGMRKPAFLSGEQKKAIVDLLFKTNRKVTVKQLKEDYFKKIECFDSVEISGVEDRFNASLGTYHDLLKIIKDKDFLDNEENEDILEDIVLTLTLFEDREMIEERLKTYAHLFDDKVMKQLKRRRYTGWGRLSRKLINGIRDKQSGKTILDFLKSDGFANRNFMQLIHDDSLTFKEDIQKAQVSGQGDSLHEHIANLAGSPAIKKGILQTVKVVDELVKVMGRHKPENIVIEMARENQTTQKGQKNSRERMKRIEEGIKELGSQILKEHPVENTQLQNEKLYLYYLQNGRDMYVDQELDINRLSDYDVDHIVPQSFLKDDSIDNKVLTRSDKNRGKSDNVPSEEVVKKMKNYWRQLLNAKLITQRKFDNLTKAERGGLSELDKAGFIKRQLVETRQITKHVAQILDSRMNTKYDENDKLIREVKVITLKSKLVSDFRKDFQFYKVREINNYHHAHDAYLNAVVGTALIKKYPKLESEFVYGDYKVYDVRKMIAKSEQEIGKATAKYFFYSNIMNFFKTEITLANTAHAEIMALRQGGLVMQNYRLIDATLYVTFEPCVMCAGAMIHSRIGRVVFGVRNAKTGAAGSLMDVLHYPGMNHRVEITEGILADECAALLCYFFRMPRQVFNAQKKAQSSTDGSSGSETPGTSESATPESSGSEVEFSHEYWMRHALTLAKRARDEREVPVGAVLVLNNRVIGEGWNRAIGLHDPGEIRKRPLIETNGETGEIVWDKGRDFATVRKVLSMPQVNIVKKTEVQTGGFSKESILPKRNSDKLIARKKDWDPKKYGGFDSPTVAYSVLVVAKVEKGKSKKLKSVKELLGITIMERSSFEKNPIDFLEAKGYKEVKKDLIIKLPKYSLFELENGRKRMLASAGELQKGNELALPSKYVNFLYLASHYEKLKGSPEDNEQKQLFVEQHKHYLDEIIEQISEFSKRVILADANLDKVLSAYNKHRDKPIREQAENIIHLFTLTNLGAPAAFKYFDTTIDRKRYTSTKEVLDATLIHQSITGLYETRIDLSQLGGD

SEQ ID NO: 1360 - protein, 1554 aa, synthetic construct
MDKKYSIGLAIGTNSVGWAVITDEYKVPSKKFKVLGNTDRHSIKKNLIGALLFDSGETAEATRLKRTARRRYTRRKNRICYLQEIFSNEMAKVDDSFFHRLEESFLVEEDKKHERHPIFGNIVDEVAYHEKYPTIYHLRKKLVDSTDKADLRLIYLALAHMIKFRGHFLIEGDLNPDNSDVDKLFIQLVQTYNQLFEENPINASGVDAKAILSARLSKSRRLENLIAQLPGEKKNGLFGNLIALSLGLTPNFKSNFDLAEDAKLQLSKDTYDDDLDNLLAQIGDQYADLFLAAKNLSDAILLSDILRVNTEITKAPLSASMIKRYDEHHQDLTLLKALVRQQLPEKYKEIFFDQSKNGYAGYIDGGASQEEFYKFIKPILEKMDGTEELLVKLNREDLLRKQRTFDNGSIPHQIHLGELHAILRRQEDFYPFLKDNREKIEKILTFRIPYYVGPLARGNSRFAWMTRKSEETITPWNFEEVVDKGASAQSFIERMTNFDKNLPNEKVLPKHSLLYEYFTVYNELTKVKYVTEGMRKPAFLSGEQKKAIVDLLFKTNRKVTVKQLKEDYFKKIECFDSVEISGVEDRFNASLGTYHDLLKIIKDKDFLDNEENEDILEDIVLTLTLFEDREMIEERLKTYAHLFDDKVMKQLKRRRYTGWGRLSRKLINGIRDKQSGKTILDFLKSDGFANRNFMQLIHDDSLTFKEDIQKAQVSGQGDSLHEHIANLAGSPAIKKGILQTVKVVDELVKVMGRHKPENIVIEMARENQTTQKGQKNSRERMKRIEEGIKELGSQILKEHPVENTQLQNEKLYLYYLQNGRDMYVDQELDINRLSDYDVDHIVPQSFLKDDSIDNKVLTRSDKNRGKSDNVPSEEVVKKMKNYWRQLLNAKLITQRKFDNLTKAERGGLSELDKAGFIKRQLVETRQITKHVAQILDSRMNTKYDENDKLIREVKVITLKSKLVSDFRKDFQFYKVREINNYHHAHDAYLNAVVGTALIKKYPKLESEFVYGDYKVYDVRKMIAKSEQEIGKATAKYFFYSNIMNFFKTEITLANGEIRKRPLIETNGETGEIVWDKGRDFATVRKVLSMPQVNIVKKTEVQTGGFSKESILPKRNSDKLIARKKDWDPKKYGGFDSPTVAYSVLVVAKVEKGKSKKLKSVKELLGITIMERSSFEKNPIDFLEAKGYKEVKKDLIIKLPKYSLFELENGRKRMLASAGELQKGNELALPSKYVNFLYLASHYEKLKGTAHAEIMALRQGGLVMQNYRLIDATLYVTFEPCVMCAGAMIHSRIGRVVFGVRNAKTGAAGSLMDVLHYPGMNHRVEITEGILADECAALLCYFFRMPRQVFNAQKKAQSSTDGSSGSETPGTSESATPESSGSEVEFSHEYWMRHALTLAKRARDEREVPVGAVLVLNNRVIGEGWNRAIGLHDPSPEDNEQKQLFVEQHKHYLDEIIEQISEFSKRVILADANLDKVLSAYNKHRDKPIREQAENIIHLFTLTNLGAPAAFKYFDTTIDRKRYTSTKEVLDATLIHQSITGLYETRIDLSQLGGD

SEQ ID NO: 1361-1362 - skipped (2 entries)

SEQ ID NO: 1363 - protein, 160 aa, unidentified
MGSHMTNDIYFMTLAIEEAKKAAQLGEVPIGAIITKDDEVIARAHNLRETLQQPTAHAEHIAIERAAKVLGSWRLEGCTLYVTLEPCVMCAGTIVMSRIPRVVYGADDPKGGCSGSLMNLLQQSNFNHRAIVDKGVLKEACSTLLTTFFKNLRANKKSTN

SEQ ID NO: 1364 - protein, 161 aa, unidentified
MTQDELYMKEAIKEAKKAEEKGEVPIGAVLVINGEIIARAHNLRETEQRSIAHAEMLVIDEACKALGTWRLEGATLYVTLEPCPMCAGAVVLSRVEKVVFGAFDPKGGCSGTLMNLLQEERFNHQAEVVSGVLEEECGGMLSAFFRELRKKKKAARKNLSE

SEQ ID NO: 1365 - protein, 183 aa, unidentified
MPPAFITGVTSLSDVELDHEYWMRHALTLAKRAWDEREVPVGAVLVHNHRVIGEGWNRPIGRHDPTAHAEIMALRQGGLVLQNYRLLDTTLYVTLEPCVMCAGAMVHSRIGRVVFGARDAKTGAAGSLIDVLHHPGMNHRVEIIEGVLRDECATLLSDFFRMRRQEIKALKKADRAEGAGPAV

SEQ ID NO: 1366 - protein, 164 aa, unidentified
MDEYWMQVAMQMAEKAEAAGEVPVGAVLVKDGQQIATGYNLSISQHDPTAHAEILCLRSAGKKLENYRLLDATLYITLEPCAMCAGAMVHSRIARVVYGARDEKTGAAGTVVNLLQHPAFNHQVEVTSGVLAEACSAQLSRFFKRRRDEKKALKLAQRAQQGIE

SEQ ID NO: 1367 - protein, 173 aa, unidentified
MDAAKVRSEFDEKMMRYALELADKAEALGEIPVGAVLVDDARNIIGEGWNLSIVQSDPTAHAEIIALRNGAKNIQNYRLLNSTLYVTLEPCTMCAGAILHSRIKRLVFGASDYKTGAIGSRFHFFDDYKMNHTLEITSGVLAEECSQKLSTFFQKRREEKKIEKALLKSLSDK

SEQ ID NO: 1368 - protein, 161 aa, unidentified
MRTDESEDQDHRMMRLALDAARAAAEAGETPVGAVILDPSTGEVIATAGNGPIAAHDPTAHAEIAAMRAAAAKLGNYRLTDLTLVVTLEPCAMCAGAISHARIGRVVFGADDPKGGAVVHGPKFFAQPTCHWRPEVTGGVLADESADLLRGFFRARRKAKI

SEQ ID NO: 1369 - protein, 179 aa, unidentified
MSSLKKTPIRDDAYWMGKAIREAAKAAARDEVPIGAVIVRDGAVIGRGHNLREGSNDPSAHAEMIAIRQAARRSANWRLTGATLYVTLEPCLMCMGAIILARLERVVFGCYDPKGGAAGSLYDLSADPRLNHQVRLSPGVCQEECGTMLSDFFRDLRRRKKAKATPALFIDERKVPPEP

SEQ ID NO: 1370 - protein, 167 aa, unidentified; identical to SEQ ID NO: 8

SEQ ID NO: 1371-1372 - skipped (2 entries)

SEQ ID NO: 1373 - protein, 198 aa, Mus sp.
MDSLLMKQKKFLYHFKNVRWAKGRHETYLCYVVKRRDSATSCSLDFGHLRNKSGCHVELLFLRYISDWDLDPGRCYRVTWFTSWSPCYDCARHVAEFLRWNPNLSLRIFTARLYFCEDRKAEPEGLRRLHRAGVQIGIMTFKDYFYCWNTFVENRERTFKAWEGLHENSVRLTRQLRRILLPLYEVDDLRDAFRMLGF

SEQ ID NO: 1374 - protein, 198 aa, Canis lupus
MDSLLMKQRKFLYHFKNVRWAKGRHETYLCYVVKRRDSATSFSLDFGHLRNKSGCHVELLFLRYISDWDLDPGRCYRVTWFTSWSPCYDCARHVADFLRGYPNLSLRIFAARLYFCEDRKAEPEGLRRLHRAGVQIAIMTFKDYFYCWNTFVENREKTFKAWEGLHENSVRLSRQLRRILLPLYEVDDLRDAFRTLGL

SEQ ID NO: 1375 - protein, 199 aa, Bos sp.
MDSLLKKQRQFLYQFKNVRWAKGRHETYLCYVVKRRDSPTSFSLDFGHLRNKAGCHVELLFLRYISDWDLDPGRCYRVTWFTSWSPCYDCARHVADFLRGYPNLSLRIFTARLYFCDKERKAEPEGLRRLHRAGVQIAIMTFKDYFYCWNTFVENHERTFKAWEGLHENSVRLSRQLRRILLPLYEVDDLRDAFRTLGL

SEQ ID NO: 1376 - protein, 239 aa, Rattus sp.
MAVGSKPKAALVGPHWERERIWCFLCSTGLGTQQTGQTSRWLRPAATQDPVSPPRSLLMKQRKFLYHFKNVRWAKGRHETYLCYVVKRRDSATSFSLDFGYLRNKSGCHVELLFLRYISDWDLDPGRCYRVTWFTSWSPCYDCARHVADFLRGNPNLSLRIFTARLTGWGALPAGLMSPARPSDYFYCWNTFVENHERTFKAWEGLHENSVRLSRRLRRILLPLYEVDDLRDAFRTLGL

SEQ ID NO: 1377 - protein, 198 aa, Mus sp. [sequence omitted]

SEQ ID NO: 1378 - protein, 229 aa, Rattus sp. [sequence omitted]

SEQ ID NO: 1379 - protein, 229 aa, Mesocricetus auratus
MSSETGPVVVDPTLRRRIEPHEFDAFFDQGELRKETCLLYEIRWGGRHNIWRHTGQNTSRHVEINFIEKFTSERYFYPSTRCSIVWFLSWSPCGECSKAITEFLSGHPNVTLFIYAARLYHHTDQRNRQGLRDLISRGVTIRIMTEQEYCYCWRNFVNYPPSNEVYWPRYPNLWMRLYALELYCIHLGLPPCLKIKRRHQYPLTFFRLNLQSCHYQRIPPHILWATGFI

SEQ ID NO: 1380 - protein, 236 aa, Pongo pygmaeus
MTSEKGPSTGDPTLRRRIESWEFDVFYDPRELRKETCLLYEIKWGMSRKIWRSSGKNTTNHVEVNFIKKFTSERRFHSSISCSITWFLSWSPCWECSQAIREFLSQHPGVTLVIYVARLFWHMDQRNRQGLRDLVNSGVTIQIMRASEYYHCWRNFVNYPPGDEAHWPQYPPLWMMLYALELHCIILSLPPCLKISRRWQNHLAFFRLHLQNCHYQTIPPHILLATGLIHPSVTWR

SEQ ID NO: 1381 - protein, 236 aa, Oryctolagus cuniculus
MASEKGPSNKDYTLRRRIEPWEFEVFFDPQELRKEACLLYEIKWGASSKTWRSSGKNTTNHVEVNFLEKLTSEGRLGPSTCCSITWFLSWSPCWECSMAIREFLSQHPGVTLIIFVARLFQHMDRRNRQGLKDLVTSGVTVRVMSVSEYCYCWENFVNYPPGKAAQWPRYPPRWMLMYALELYCIILGLPPCLKISRRHQKQLTFFSLTPQYCHYKMIPPYILLATGLLQPSVPWR

SEQ ID NO: 1382 - protein, 235 aa, Monodelphis domestica
MNSKTGPSVGDATLRRRIKPWEFVAFFNPQELRKETCLLYEIKWGNQNIWRHSNQNTSQHAEINFMEKFTAERHFNSSVRCSITWFLSWSPCWECSKAIRKFLDHYPNVTLAIFISRLYWHMDQQHRQGLKELVHSGVTIQIMSYSEYHYCWRNFVDYPQGEEDYWPKYPYLWIMLYVLELHCIILGLPPCLKISGSHSNQLALFSLDLQDCHYQKIPYNVLVATGLVQPFVTWR

SEQ ID NO: 1383 - protein, 224 aa, Pongo pygmaeus
MAQKEEAAAATEAASQNGEDLENLDDPEKLKELIELPPFEIVTGERLPANFFKFQFRNVEYSSGRNKTFLCYVVEAQGKGGQVQASRGYLEDEHAAAHAEEAFFNTILPAFDPALRYNVTWYVSSSPCAACADRIIKTLSKTKNLRLLILVGRLFMWEELEIQDALKKLKEAGCKLRIMKPQDFEYVWQNFVEQEEGESKAFQPWEDIQENFLYYEEKLADILK

SEQ ID NO: 1384 - protein, 224 aa, Bos taurus
MAQKEEAAAAAEPASQNGEEVENLEDPEKLKELIELPPFEIVTGERLPAHYFKFQFRNVEYSSGRNKTFLCYVVEAQSKGGQVQASRGYLEDEHATNHAEEAFFNSIMPTFDPALRYMVTWYVSSSPCAACADRIVKTLNKTKNLRLLILVGRLFMWEEPEIQAALRKLKEAGCRLRIMKPQDFEYIWQNFVEQEEGESKAFEPWEDIQENFLYYEEKLADILK

SEQ ID NO: 1385 - protein, 440 aa, Mus sp.
MQPQRLGPRAGMGPFCLGCSHRKCYSPIRNLISQETFKFHFKNLGYAKGRKDTFLCYEVTRKDCDSPVSLHHGVFKNKDNIHAEICFLYWFHDKVLKVLSPREEFKITWYMSWSPCFECAEQIVRFLATHHNLSLDIFSSRLYNVQDPETQQNLCRLVQEGAQVAAMDLYEFKKCWKKFVDNGGRRFRPWKRLLTNFRYQDSKLQEILRPCYISVPSSSSSTLSNICLTKGLPETRFWVEGRRMDPLSEEEFYSQFYNQRVKHLCYYHRMKPYLCYQLEQFNGQAPLKGCLLSEKGKQHAEILFLDKIRSMELSQVTITCYLTWSPCPNCAWQLAAFKRDRPDLILHIYTSRLYFHWKRPFQKGLCSLWQSGILVDVMDLPQFTDCWTNFVNPKRPFWPWKGLEIISRRTQRRLRRIKESWGLQDLVNDFGNLQLGPPMS

SEQ ID NO: 1386 - protein, 429 aa, Mus sp.
MGPFCLGCSHRKCYSPIRNLISQETFKFHFKNLGYAKGRKDTFLCYEVTRKDCDSPVSLHHGVFKNKDNIHAEICFLYWFHDKVLKVLSPREEFKITWYMSWSPCFECAEQIVRFLATHHNLSLDIFSSRLYNVQDPETQQNLCRLVQEGAQVAAMDLYEFKKCWKKFVDNGGRRFRPWKRLLTNFRYQDSKLQEILRPCYIPVPSSSSSTLSNICLTKGLPETRFCVEGRRMDPLSEEEFYSQFYNQRVKHLCYYHRMKPYLCYQLEQFNGQAPLKGCLLSEKGKQHAEILFLDKIRSMELSQVTITCYLTWSPCPNCAWQLAAFKRDRPDLILHIYTSRLYFHWKRPFQKGLCSLWQSGILVDVMDLPQFTDCWTNFVNPKRPFWPWKGLEIISRRTQRRLRRIKESWGLQDLVNDFGNLQLGPPMS

SEQ ID NO: 1387 - protein, 430 aa, unidentified
MGPFCLGCSHRKCYSPIRNLISQETFKFHFKNRLRYAIDRKDTFLCYEVTRKDCDSPVSLHHGVFKNKDNIHAEICFLYWFHDKVLKVLSPREEFKITWYMSWSPCFECAEQVLRFLATHHNLSLDIFSSRLYNIRDPENQQNLCRLVQEGAQVAAMDLYEFKKCWKKFVDNGGRRFRPWKKLLTNFRYQDSKLQEILRPCYIPVPSSSSSTLSNICLTKGLPETRFCVERRRVHLLSEEEFYSQFYNQRVKHLCYYHGVKPYLCYQLEQFNGQAPLKGCLLSEKGKQHAEILFLDKIRSMELSQVIITCYLTWSPCPNCAWQLAAFKRDRPDLILHIYTSRLYFHWKRPFQKGLCSLWQSGILVDVMDLPQFTDCWTNFVNPKRPFWPWKGLEIISRRTQRRLHRIKESWGLQDLVNDFGNLQLGPPMS

SEQ ID NO: 1388 - protein, 199 aa, Homo sapiens
MEASPASGPRHLMDPHIFTSNFNNGIGRHKTYLCYEVERLDNGTSVKMDQHRGFLHNQAKNLLCGFYGRHAELRFLDLVPSLQLDPAQIYRVTWFISWSPCFSWGCAGEVRAFLQENTHVRLRIFAARIYDYDPLYKEALQMLRDAGAQVSIMTYDEFKHCWDTFVDHQGCPFQPWDGLDEHSQALSGRLRAILQNQGN

SEQ ID NO: 1389 - protein, 373 aa, Homo sapiens
MKPHFRNTVERMYRDTFSYNFYNRPILSRRNTVWLCYEVKTKGPSRPRLDAKIFRGQVYSQPEHHAEMCFLSWFCGNQLPAYKCFQITWFVSWTPCPDCVAKLAEFLAEHPNVTLTISAARLYYYWERDYRRALCRLSQAGARVKIMDDEEFAYCWENFVYSEGQPFMPWYKFDDNYAFLHRTLKEILRNPMEAMYPHIFYFHFKNLRKAYGRNESWLCFTMEVVKHHSPVSWKRGVFRNQVDPETHCHAERCFLSWFCDDILSPNTNYEVTWYTSWSPCPECAGEVAEFLARHSNVNLTIFTARLYYFWDTDYQEGLRSLSQEGASVEIMGYKDFKYCWENFVYNDDEPFKPWKGLKYNFLFLDSKLQEILE

SEQ ID NO: 1390 - protein, 370 aa, Macaca mulatta
MVEPMDPRTFVSNFNNRPILSGLNTVWLCCEVKTKDPSGPPLDAKIFQGKVYSKAKYHPEMRFLRWFHKWRQLHHDQEYKVTWYVSWSPCTRCANSVATFLAKDPKVTLTIFVARLYYFWKPDYQQALRILCQKRGGPHATMKIMNYNEFQDCWNKFVDGRGKPFKPRNNLPKHYTLLQATLGELLRHLMDPGTFTSNFNNKPWVSGQHETYLCYKVERLHNDTWVPLNQHRGFLRNQAPNIHGFPKGRHAELCFLDLIPFWKLDGQQYRVTCFTSWSPCFSCAQEMAKFISNNEHVSLCIFAARIYDDQGRYQEGLRALHRDGAKIAMMNYSEFEYCWDTFVDRQGRPFQPWDGLDEHSQALSGRLRAI

SEQ ID NO: 1391 - protein, 384 aa, Pan troglodytes
MKPHFRNPVERMYQDTFSDNFYNRPILSHRNTVWLCYEVKTKGPSRPPLDAKIFRGQVYSKLKYHPEMRFFHWFSKWRKLHRDQEYEVTWYISWSPCTKCTRDVATFLAEDPKVTLTIFVARLYYFWDPDYQEALRSLCQKRDGPRATMKIMNYDEFQHCWSKFVYSQRELFEPWNNLPKYYILLHIMLGEILRHSMDPPTFTSNFNNELWVRGRHETYLCYEVERLHNDTWVLLNQRRGFLCNQAPHKHGFLEGRHAELCFLDVIPFWKLDLHQDYRVTCFTSWSPCFSCAQEMAKFISNNKHVSLCIFAARIYDDQGRCQEGLRTLAKAGAKISIMTYSEFKHCWDTFVDHQGCPFQPWDGLEEHSQALSGRLRAILQNQGN

SEQ ID NO: 1392 - protein, 377 aa, Chlorocebus sp.
MNPQIRNMVEQMEPDIFVYYFNNRPILSGRNTVWLCYEVKTKDPSGPPLDANIFQGKLYPEAKDHPEMKFLHWFRKWRQLHRDQEYEVTWYVSWSPCTRCANSVATFLAEDPKVTLTIFVARLYYFWKPDYQQALRILCQERGGPHATMKIMNYNEFQHCWNEFVDGQGKPFKPRKNLPKHYTLLHATLGELLRHVMDPGTFTSNFNNKPWVSGQRETYLCYKVERSHNDTWVLLNQHRGFLRNQAPDRHGFPKGRHAELCFLDLIPFWKLDDQQYRVTCFTSWSPCFSCAQKMAKFISNNKHVSLCIFAARIYDDQGRCQEGLRTLHRDGAKIAVMNYSEFEYCWDTFVDRQGRPFQPWDGLDEHSQALSGRLRAI

SEQ ID NO: 1393 - protein, 384 aa, Homo sapiens
MKPHFRNTVERMYRDTFSYNFYNRPILSRRNTVWLCYEVKTKGPSRPPLDAKIFRGQVYSELKYHPEMRFFHWFSKWRKLHRDQEYEVTWYISWSPCTKCTRDMATFLAEDPKVTLTIFVARLYYFWDPDYQEALRSLCQKRDGPRATMKIMNYDEFQHCWSKFVYSQRELFEPWNNLPKYYILLHIMLGEILRHSMDPPTFTFNFNNEPWVRGRHETYLCYEVERMHNDTWVLLNQRRGFLCNQAPHKHGFLEGRHAELCFLDVIPFWKLDLDQDYRVTCFTSWSPCFSCAQEMAKFISKNKHVSLCIFTARIYDDQGRCQEGLRTLAEAGAKISIMTYSEFKHCWDTFVDHQGCPFQPWDGLDEHSQDLSGRLRAILQNQEN

SEQ ID NO: 1394 - protein, 382 aa, Homo sapiens
MNPQIRNPMERMYRDTFYDNFENEPILYGRSYTWLCYEVKIKRGRSNLLWDTGVFRGQVYFKPQYHAEMCFLSWFCGNQLPAYKCFQITWFVSWTPCPDCVAKLAEFLSEHPNVTLTISAARLYYYWERDYRRALCRLSQAGARVTIMDYEEFAYCWENFVYNEGQQFMPWYKFDENYAFLHRTLKEILRYLMDPDTFTFNFNNDPLVLRRRQTYLCYEVERLDNGTWVLMDQHMGFLCNEAKNLLCGFYGRHAELRFLDLVPSLQLDPAQIYRVTWFISWSPCFSWGCAGEVRAFLQENTHVRLRIFAARIYDYDPLYKEALQMLRDAGAQVSIMTYDEFEYCWDTFVYRQGCPFQPWDGLEEHSQALSGRLRAILQNQGN

SEQ ID NO: 1395 - protein, 395 aa, Rattus sp.
MQPQGLGPNAGMGPVCLGCSHRRPYSPIRNPLKKLYQQTFYFHFKNVRYAWGRKNNFLCYEVNGMDCALPVPLRQGVFRKQGHIHAELCFIYWFHDKVLRVLSPMEEFKVTWYMSWSPCSKCAEQVARFLAAHRNLSLAIFSSRLYYYLRNPNYQQKLCRLIQEGVHVAAMDLPEFKKCWNKFVDNDGQPFRPWMRLRINFSFYDCKLQEIFSRMNLLREDVFYLQFNNSHRVKPVQNRYYRRKSYLCYQLERANGQEPLKGYLLYKKGEQHVEILFLEKMRSMELSQVRITCYLTWSPCPNCARQLAAFKKDHPDLILRIYTSRLYFWRKKFQKGLCTLWRSGIHVDVMDLPQFADCWTNFVNPQRPFRPWNELEKNSWRIQRRLRRIKESWGL

SEQ ID NO: 1396 - protein, 226 aa, Bos sp.
DGWEVAFRSGTVLKAGVLGVSMTEGWAGSGHPGQGACVWTPGTRNTMNLLREVLFKQQFGNQPRVPAPYYRRKTYLCYQLKQRNDLTLDRGCFRNKKQRHAERFIDKINSLDLNPSQSYKIICYITWSPCPNCANELVNFITRNNHLKLEIFASRLYFHWIKSFKMGLQDLQNAGISVAVMTHTEFEDCWEQFVDNQSRPFQPWDKLEQYSASIRRRLQRILTAPI

SEQ ID NO: 1397 - protein, 490 aa, Pan troglodytes
MNPQIRNPMEWMYQRTFYYNFENEPILYGRSYTWLCYEVKIRRGHSNLLWDTGVFRGQMYSQPEHHAEMCFLSWFCGNQLSAYKCFQITWFVSWTPCPDCVAKLAKFLAEHPNVTLTISAARLYYYWERDYRRALCRLSQAGARVKIMDDEEFAYCWENFVYNEGQPFMPWYKFDDNYAFLHRTLKEIIRHLMDPDTFTFNFNNDPLVLRRHQTYLCYEVERLDNGTWVLMDQHMGFLCNEAKNLLCGFYGRHAELRFLDLVPSLQLDPAQIYRVTWFISWSPCFSWGCAGQVRAFLQENTHVRLRIFAARIYDYDPLYKEALQMLRDAGAQVSIMTYDEFEYCWDTFVYRQGCPFQPWDGLEEHSQALSGRLRAILQVRASSLCMVPHRPPPPPQSPGPCLPLCSEPPLGSLLPTGRPAPSLPFLLTASFSFPPPASLPPLPSLSLSPGHLPVPSFHSLTSCSIQPPCSSRIRETEGWASVSKEGRDLG

SEQ ID NO: 1398 - protein, 190 aa, Homo sapiens
MNPQIRNPMKAMYPGTFYFQFKNLWEANDRNETWLCFTVEGIKRRSVVSWKTGVFRNQVDSETHCHAERCFLSWFCDDILSPNTKYQVTWYTSWSPCPDCAGEVAEFLARHSNVNLTIFTARLYYFQYPCYQEGLRSLSQEGVAVEIMDYEDFKYCWENFVYNDNEPFKPWKGLKTNFRLLKRRLRESLQ

SEQ ID NO: 1399 - protein, 190 aa, Gorilla sp.
MNPQIRNPMKAMYPGTFYFQFKNLWEANDRNETWLCFTVEGIKRRSVVSWKTGVFRNQVDSETHCHAERCFLSWECDDILSPNTNYQVTWYTSWSPCPECAGEVAEFLARHSNVNLTIFTARLYYFQDTDYQEGLRSLSQEGVAVKIMDYKDFKYCWENFVYNDDEPFKPWKGLKYNFRFLKRRLQEILE

SEQ ID NO: 1400 - protein, 202 aa, Macaca mulatta
MDGSPASRPRHLMDPNTFTFNFNNDLSVRGRHQTYLCYEVERLDNGTWVPMDERRGFLCNKAKNVPCGDYGCHVELRFLCEVPSWQLDPAQTYRVTWFISWSPCFRRGCAGQVRVFLQENKHVRLRIFAARIYDYDPLYQEALRTLRDAGAQVSIMTYEEFKHCWDTFVDRQGRPFQPWDGLDEHSQALSGRLRAILQNQGN

SEQ ID NO: 1401 - protein, 185 aa, Bos sp.
MDEYTFTENFNNQGWPSKTYLCYEMERLDGDATIPLDEYKGFVRNKGLDQPEKPCHAELYFLGKIHSWNLDRNQHYRLTCFISWSPCYDCAQKLTTFLKENHHISLHILASRIYTHNRFGCHQSGLCELQAAGARITIMTFEDFKHCWETFVDHKGKPFQPWEGLNVKSQALCTELQAILKTQQN

SEQ ID NO: 1402 - protein, 200 aa, Homo sapiens
MALLTAETFRLQFNNKRRLRRPYYPRKALLCYQLTPQNGSTPTRGYFENKKKCHAEICFINEIKSMGLDETQCYQVTCYLTWSPCSSCAWELVDFIKAHDHLNLGIFASRLYYHWCKPQQKGLRLLCGSQVPVEVMGFPKFADCWENFVDHEKPLSFNPYKMLEELDKNSRAIKRRLERIKIPGVRAQGRYMDILCDAEV

SEQ ID NO: 1403 - protein, 210 aa, Macaca mulatta
MALLTAKTFSLQFNNKRRVNKPYYPRKALLCYQLTPQNGSTPTRGHLKNKKKDHAEIRFINKIKSMGLDETQCYQVTCYLTWSPCPSCAGELVDFIKAHRHLNLRIFASRLYYHWRPNYQEGLLLLCGSQVPVEVMGLPEFTDCWENFVDHKEPPSFNPSEKLEELDKNSQAIKRRLERIKSRSVDVLENGLRSLQLGPVTPSSSIRNSR

SEQ ID NO: 1404 - protein, 386 aa, Homo sapiens
MNPQIRNPMERMYRDTFYDNFENEPILYGRSYTWLCYEVKIKRGRSNLLWDTGVFRGPVLPKRQSNHRQEVYFRFENHAEMCFLSWFCGNRLPANRRFQITWFVSWNPCLPCVVKVTKFLAEHPNVTLTISAARLYYYRDRDWRWVLLRLHKAGARVKIMDYEDFAYCWENFVCNEGQPFMPWYKFDDNYASLHRTLKEILRNPMEAMYPHIFYFHFKNLLKACGRNESWLCFTMEVTKHHSAVFRKRGVFRNQVDPETHCHAERCFLSWFCDDILSPNTNYEVTWYTSWSPCPECAGEVAEFLARHSNVNLTIFTARLCYFWDTDYQEGLCSLSQEGASVKIMGYKDFVSCWKNFVYSDDEPFKPWKGLQTNFRLLKRRLREILQ

SEQ ID NO: 1405 - protein, 236 aa, Homo sapiens
MTSEKGPSTGDPTLRRRIEPWEFDVFYDPRELRKEACLLYEIKWGMSRKIWRSSGKNTTNHVEVNFIKKFTSERDFHPSMSCSITWFLSWSPCWECSQAIREFLSRHPGVTLVIYVARLFWHMDQQNRQGLRDLVNSGVTIQIMRASEYYHCWRNFVNYPPGDEAHWPQYPPLWMMLYALELHCIILSLPPCLKISRRWQNHLTFFRLHLQNCHYQTIPPHILLATGLIHPSVAWR

SEQ ID NO: 1406 - protein, 229 aa, Mus sp.
MSSETGPVAVDPTLRRRIEPHEFEVFFDPRELRKETCLLYEINWGGRHSVWRHTSQNTSNHVEVNFLEKFTTERYFRPNTRCSITWFLSWSPCGECSRAITEFLSRHPYVTLFIYIARLYHHTDQRNRQGLRDLISSGVTIQIMTEQEYCYCWRNFVNYPPSNEAYWPRYPHLWVKLYVLELYCIILGLPPCLKILRRKQPQLTFFTITLQTCHYQRIPPHLLWATGLK

SEQ ID NO: 1407 - protein, 224 aa, Homo sapiens
MAQKEEAAVATEAASQNGEDLENLDDPEKLKELIELPPFEIVTGERLPANFFKFQFRNVEYSSGRNKTFLCYVVEAQGKGGQVQASRGYLEDEHAAAHAEEAFFNTILPAFDPALRYNVTWYVSSSPCAACADRIIKTLSKTKNLRLLILVGRLFMWEEPEIQAALKKLKEAGCKLRIMKPQDFEYVWQNFVEQEEGESKAFQPWEDIQENFLYYEEKLADILK

SEQ ID NO: 1408 - protein, 224 aa, Mus sp.
MAQKEEAAEAAAPASQNGDDLENLEDPEKLKELIDLPPFEIVTGVRLPVNFFKFQFRNVEYSSGRNKTFLCYVVEVQSKGGQAQATQGYLEDEHAGAHAEEAFFNTILPAFDPALKYNVTWYVSSSPCAACADRILKTLSKTKNLRLLILVSRLFMWEEPEVQAALKKLKEAGCKLRIMKPQDFEYIWQNFVEQEEGESKAFEPWEDIQENFLYYEEKLADILK

SEQ ID NO: 1409 - protein, 224 aa, Rattus sp.
MAQKEEAAEAAAPASQNGDDLENLEDPEKLKELIDLPPFEIVTGVRLPVNFFKFQFRNVEYSSGRNKTFLCYVVEAQSKGGQVQATQGYLEDEHAGAHAEEAFFNTILPAFDPALKYNVTWYVSSSPCAACADRILKTLSKTKNLRLLILVSRLFMWEEPEVQAALKKLKEAGCKLRIMKPQDFEYLWQNFVEQEEGESKAFEPWEDIQENFLYYEEKLADILK

SEQ ID NO: 1410 - protein, 208 aa, Petromyzon marinus
MTDAEYVRIHEKLDIYTFKKQFFNNKKSVSHRCYVLFELKRRGERRACFWGYAVNKPQSGTERGIHAEIFSIRKVEEYLRDNPGQFTINWYSSWSPCADCAEKILEWYNQELRGNGHTLKIWACKLYYEKNARNQIGLWNLRDNGVGLNVMVSEHYQCCRKIFIQSSHNQLNENRWLEKTLKRAEKRRSELSFMIQVKILHTTKSPAV

SEQ ID NO: 1411 - protein, 381 aa, synthetic construct
MKPHFRNTVERMYRDTFSYNFYNRPILSRRNTVWLCYEVKTKGPSRPPLDAKIFRGQVYSELKYHPEMRFFHWFSKWRKLHRDQEYEVTWYISWSPCTKCTRDMATFLAEDPKVTLTIFVARLYYFWDPDYQEALRSLCQKRDGPRATMKFNYDEFQHCWSKFVYSQRELFEPWNNLPKYYILLHFMLGEILRHSMDPPTFTFNFNNEPWVRGRHETYLCYEVERMHNDTWVLLNQRRGFLCNQAPHKHGFLEGRHAELCFLDVIPFWKLDLDQDYRVTCFTSWSPCFSCAQEMAKFISKKHVSLCIFTARIYRRQGRCQEGLRTLAEAGAKISFTYSEFKHCWDTFVDHQGCPFQPWDGLDEHSQDLSGRLRAILQNQEN

SEQ ID NO: 1412 - protein, 182 aa, Homo sapiens
MDPPTFTFNFNNEPWWGRHETYLCYEVERMHNDTWVLLNQRRGFLCNQAPHKHGFLEGRHAELCFLDVIPFWKLDLDQDYRVTCFTSWSPCFSCAQEMAKFISKNKHVSLCIFTARIYDDQGRCQEGLRTLAEAGAKISFTYSEFKHCWDTFVDHQGCPFQPWDGLDEHSQDLSGRLRAILQ

SEQ ID NO: 1413 - skipped

SEQ ID NO: 1414 - protein, 184 aa, synthetic construct
MDPPTFTFNFNNEPWVRGRHETYLCYEVERMHNDTWVLLNQRRGFLCNQAPHKHGFLEGRHAELCFLDVIPFWKLDLDQDYRVTCFTSWSPCFSCAQEMAKFISKNKHVSLCIFTARIYRRQGRCQEGLRTLAEAGAKISFMTYSEFKHCWDTFVDHQGCPFQPWDGLDEHSQDLSGRLRAILQ

SEQ ID NO: 1415 - protein, 367 aa, Homo sapiens
MEPIYEEYLANHGTIVKPYYWLSFSLDCSNCPYHIRTGEEARVSLTEFCQIFGFPYGTTFPQTKHLTFYELKTSSGSLVQKGHASSCTGNYIHPESMLFEMNGYLDSAIYNNDSIRHIILYSNNSPCNEANHCCISKMYNFLITYPGITLSIYFSQLYHTEMDFPASAWNREALRSLASLWPRVVLSPISGGIWHSVLHSFISGVSGSHVFQPILTGRALADRHNAYEINAITGVKPYFTDVLLQTKRNPNTKAQEALESYPLNNAFPGQFFQMPSGQLQPNLPPDLRAPVVFVLVPLRDLPPMHMGQNPNKPRNIVRHLNMPQMSFQETKDLGRLPTGRSVEIVEITEQFASSKEADEKKKKKGKK

SEQ ID NO: 1416 - protein, 388 aa, Rattus sp.
MEPLYEEYLTHSGTIVKPYYWLSVSLNCTNCPYHIRTGEEARVPYTEFHQTFGFPWSTYPQTKHLTFYELRSSSGNLIQKGLASNCTGSHTHPESMLFERDGYLDSLIFHDSNIRHIILYSNNSPCDEANHCCISKMYNFLMNYPEVTLSVFFSQLYHTENQFPTSAWNREALRGLASLWPQVTLSAISGGIWQSILETFVSGISEGLTAVRPFTAGRTLTDRYNAYEINCITEVKPYFTDALHSWQKENQDQKVWAASENQPLHNTTPAQWQPDMSQDCRTPAVFMLVPYRDLPPIHVNPSPQKPRTVVRHLNTLQLSASKVKALRKSPSGRPVKKEEARKGSTRSQEANETNKSKWKKQTLFIKSNICHLLEREQKKIGILSSWSV

SEQ ID NO: 1417 - protein, 224 aa, Petromyzon marinus
MAGYECVRVSEKLDFDTFEFQFENLHYATERHRTYVIFDVKPQSAGGRSRRLWGYIINNPNVCHAELILMSMIDRHLESNPGVYAMTWYMSWSPCANCSSKLNPWLKNLLEEQGHTLTMHFSRIYDRDREGDHRGLRGLKHVSNSFRMGVVGRAEVKECLAEYVEASRRTLTWLDTTESMAAKMRRKLFCILVRCAGMRESGIPLHLFTLQTPLLSGRVVWWRV

SEQ ID NO: 1418 - protein, 331 aa, Petromyzon marinus
MELREVVDCALASCVRHEPLSRVAFLRCFAAPSQKPRGTVILFYVEGAGRGVTGGHAVNYNKQGTSIHAEVLLLSAVRAALLRRRRCEDGEEATRGCTLHCYSTYSPCRDCVEYIQEFGASTGVRVVIHCCRLYELDVNRRRSEAEGVLRSLSRLGRDFRLMGPRDAIALLLGGRLANTADGESGASGNAWVTETNVVEPLVDMTGFGDEDLHAQVQRNKQIREAYANYASAVSLMLGELHVDPDKFPFLAEFLAQTSVEPSGTPRETRGRPRGASSRGPEIGRQRPADFERALGAYGLFLHPRIVSREADREEIKRDLIVVMRKHNYQGP

SEQ ID NO: 1419 - protein, 209 aa, Petromyzon marinus
MAGDENVRVSEKLDFDTFEFQFENLHYATERHRTYVIFDVKPQSAGGRSRRLWGYIINNPNVCHAELILMSMIDRHLESNPGVYAMTWYMSWSPCANCSSKLNPWLKNLLEEQGHTLMMHFSRIYDRDREGDHRGLRGLKHVSNSFRMGVVGRAEVKECLAEYVEASRRTLTWLDTTESMAAKMRRKLFCILVRCAGMRESGMPLHLFT

SEQ ID NO: 1420 - protein, 158 aa, unidentified
MVTGGMASKWDQKGMDIAYEEAALGYKEGGVPIGGCLINNKDGSVLGRGHNMRFQKGSATLHGEISTLENCGRLEGKVYKDTTLYTTLSPCDMCTGAIIMYGIPRCVVGENVNFKSKGEKYLQTRGHEVVVVDDERCKKIMKQFIDERPQDWFEDIGE

SEQ ID NO: 1421 - protein, 218 aa, synthetic construct
MSSETGPVAVDPTLRRRIEPHEFEVFFDPRELRKETCLLYEINWGGRHSIWRHTSQNTNKHVEVNFIEKFTTERYFCPNTRCSITWFLSWSPCGECSRAITEFLSRYPHVTLFIYIARLYHHADPRNRQGLRDLISSGVTIQIMTEQESGYCWRNFVNYSPSNEAHWPRYPHLWVRGLPPCLNILRRKQPQLTFFTIALQSCHYQRLPPHILWATGLK

SEQ ID NO: 1422 - protein, 218 aa, synthetic construct
MSSETGPVAVDPTLRRRIEPHEFEVFFDPRELRKETCLLYEINWGGRHSIWRHTSQNTNKHVEVNFIEKFTTERYFCPNTRCSITWFLSWSPCGECSRAITEFLSRYPHVTLFIYIARLYHHADPRNRQGLRDLISSGVTIQIMTEQESGYCWRNFVNYSPSNEAHWPRYPHLWVRLYVLELYCIILGLPPCLNILRRKQPQHYQRLPPHILWATGLK

SEQ ID NO: 1423 - protein, 1368 aa, synthetic construct
MDKKYSIGLAIGTNSVGWAVITDEYKVPSKKFKVLGNTDRHSIKKNLIGALLFDSGETAEATRLKRTARRRYTRRKNRICYLQEIFSNEMAKVDDSFFHRLEESFLVEEDKKHERHPIFGNIVDEVAYHEKYPTIYHLRKKLVDSTDKADLRLIYLALAHMIKFRGHFLIEGDLNPDNSDVDKLFIQLVQTYNQLFEENPINASGVDAKAILSARLSKSRRLENLIAQLPGEKKNGLFGNLIALSLGLTPNFKSNFDLAEDAKLQLSKDTYDDDLDNLLAQIGDQYADLFLAAKNLSDAILLSDILRVNTEITKAPLSASMIKRYDEHHQDLTLLKALVRQQLPEKYKEIFFDQSKNGYAGYIDGGASQEEFYKFIKPILEKMDGTEELLVKLNREDLLRKQRTFDNGSIPHQIHLGELHAILRRQEDFYPFLKDNREKIEKILTFRIPYYVGPLARGNSRFAWMTRKSEETITPWNFEEVVDKGASAQSFIERMTAFDKNLPNEKVLPKHSLLYEYFTVYNELTKVKYVTEGMRKPAFLSGEQKKAIVDLLFKTNRKVTVKQLKEDYFKKIECFDSVEISGVEDRFNASLGTYHDLLKIIKDKDFLDNEENEDILEDIVLTLTLFEDREMIEERLKTYAHLFDDKVMKQLKRRRYTGWGALSRKLINGIRDKQSGKTILDFLKSDGFANRNFMALIHDDSLTFKEDIQKAQVSGQGDSLHEHIANLAGSPAIKKGILQTVKVVDELVKVMGRHKPENIVIEMARENQTTQKGQKNSRERMKRIEEGIKELGSQILKEHPVENTQLQNEKLYLYYLQNGRDMYVDQELDINRLSDYDVDHIVPQSFLKDDSIDNKVLTRSDKNRGKSDNVPSEEVVKKMKNYWRQLLNAKLITQRKFDNLTKAERGGLSELDKAGFIKRQLVETRAITKHVAQILDSRMNTKYDENDKLIREVKVITLKSKLVSDFRKDFQFYKVREINNYHHAHDAYLNAVVGTALIKKYPKLESEFVYGDYKVYDVRKMIAKSEQEIGKATAKYFFYSNIMNFFKTEITLANGEIRKRPLIETNGETGEIVWDKGRDFATVRKVLSMPQVNIVKKTEVQTGGFSKESILPKRNSDKLIARKKDWDPKKYGGFDSPTVAYSVLVVAKVEKGKSKKLKSVKELLGITIMERSSFEKNPIDFLEAKGYKEVKKDLIIKLPKYSLFELENGRKRMLASAGELQKGNELALPSKYVNFLYLASHYEKLKGSPEDNEQKQLFVEQHKHYLDEIIEQISEFSKRVILADANLDKVLSAYNKHRDKPIREQAENIIHLFTLTNLGAPAAFKYFDTTIDRKRYTSTKEVLDATLIHQSITGLYETRIDLSQLGGD

SEQ ID NO: 1424 - protein, 23 aa, synthetic construct
RKSGKIAAIVVKRPRKPKKKRKV

SEQ ID NO: 1425 - protein, 8 aa, synthetic construct
SGGSSGGS

SEQ ID NO: 1426 - protein, 1609 aa, synthetic construct
MSEVEFSHEYWMRHALTLAKRARDEREVPVGAVLVLNNRVIGEGWNRAIGLHDPTAHAEIMALRQGGLVMQNYRLIDATLYVTFEPCVMCAGAMIHSRIGRVVFGVRNAKTGAAGSLMDVLHYPGMNHRVEITEGILADECAALLCTFFRMPRQVFNAQKKAQSSTDSGGSSGGSSGSETPGTSESATPESSGGSSGGSEIGKATAKYFFYSNIMNFFKTEITLANGEIRKRPLIETNGETGEIVWDKGRDFATVRKVLSMPQVNIVKKTEVQTGGFSKESILPKRNSDKLIARKKDWDPKKYGGFMQPTVAYSVLVVAKVEKGKSKKLKSVKELLGITIMERSSFEKNPIDFLEAKGYKEVKKDLIIKLPKYSLFELENGRKRMLASAKFLQKGNELALPSKYVNFLYLASHYEKLKGSPEDNEQKQLFVEQHKHYLDEIIEQISEFSKRVILADANLDKVLSAYNKHRDKPIREQAENIIHLFTLTNLGAPRAFKYFDTTIARKEYRSTKEVLDATLIHQSITGLYETRIDLSQLGGDGGSGGSGGSGGSGGSGGSGGMDKKYSIGLAIGTNSVGWAVITDEYKVPSKKFKVLGNTDRHSIKKNLIGALLFDSGETAEATRLKRTARRRYTRRKNRICYLQEIFSNEMAKVDDSFFHRLEESFLVEEDKKHERHPIFGNIVDEVAYHEKYPTIYHLRKKLVDSTDKADLRLIYLALAHMIKFRGHFLIEGDLNPDNSDVDKLFIQLVQTYNQLFEENPINASGVDAKAILSARLSKSRRLENLIAQLPGEKKNGLFGNLIALSLGLTPNFKSNFDLAEDAKLQLSKDTYDDDLDNLLAQIGDQYADLFLAAKNLSDAILLSDILRVNTEITKAPLSASMIKRYDEHHQDLTLLKALVRQQLPEKYKEIFFDQSKNGYAGYIDGGASQEEFYKFIKPILEKMDGTEELLVKLNREDLLRKQRTFDNGSIPHQIHLGELHAILRRQEDFYPFLKDNREKIEKILTFRIPYYVGPLARGNSRFAWMTRKSEETITPWNFEEVVDKGASAQSFIERMTNFDKNLPNEKVLPKHSLLYEYFTVYNELTKVKYVTEGMRKPAFLSGEQKKAIVDLLFKTNRKVTVKQLKEDYFKKIECFDSVEISGVEDRFNASLGTYHDLLKIIKDKDFLDNEENEDILEDIVLTLTLFEDREMIEERLKTYAHLFDDKVMKQLKRRRYTGWGRLSRKLINGIRDKQSGKTILDFLKSDGFANRNFMQLIHDDSLTFKEDIQKAQVSGQGDSLHEHIANLAGSPAIKKGILQTVKVVDELVKVMGRHKPENIVIEMARENQTTQKGQKNSRERMKRIEEGIKELGSQILKEHPVENTQLQNEKLYLYYLQNGRDMYVDQELDINRLSDYDVDHIVPQSFLKDDSIDNKVLTRSDKNRGKSDNVPSEEVVKKMKNYWRQLLNAKLITQRKFDNLTKAERGGLSELDKAGFIKRQLVETRQITKHVAQILDSRMNTKYDENDKLIREVKVITLKSKLVSDFRKDFQFYKVREINNYHHAHDAYLNAVVGTALIKKYPKLESEFVYGDYKVYDVRKMIAKSEQEGADKRTADGSEFESPKKKRKV

SEQ ID NO: 1427 - protein, 1807 aa, synthetic construct
MSEVEFSHEYWMRHALTLAKRAWDEREVPVGAVLVHNNRVIGEGWNRPIGRHDPTAHAEIMALRQGGLVMQNYRLIDATLYVTLEPCVMCAGAMIHSRIGRVVFGARDAKTGAAGSLMDVLHHPGMNHRVEITEGILADECAALLSDFFRMRRQEIKAQKKAQSSTDGGSSGGSSGSETPGTSESATPESSGGSSGGSMSEVEFSHEYWMRHALTLAKRARDEREVPVGAVLVLNNRVIGEGWNRAIGLHDPTAHAEIMALRQGGLVMQNYRLIDATLYVTFEPCVMCAGAMIHSRIGRVVFGVRNAKTGAAGSLMDVLHYPGMNHRVEITEGILADECAALLCTFFRMPRQVFNAQKKAQSSTDSGGSSGGSSGSETPGTSESATPESSGGSSGGSEIGKATAKYFFYSNIMNFFKTEITLANGEIRKRPLIETNGETGEIVWDKGRDFATVRKVLSMPQVNIVKKTEVQTGGFSKESILPKRNSDKLIARKKDWDPKKYGGFMQPTVAYSVLVVAKVEKGKSKKLKSVKELLGITIMERSSFEKNPIDFLEAKGYKEVKKDLIIKLPKYSLFELENGRKRMLASAKFLQKGNELALPSKYVNFLYLASHYEKLKGSPEDNEQKQLFVEQHKHYLDEIIEQISEFSKRVILADANLDKVLSAYNKHRDKPIREQAENIIHLFTLTNLGAPRAFKYFDTTIARKEYRSTKEVLDATLIHQSITGLYETRIDLSQLGGDGGSGGSGGSGGSGGSGGSGGMDKKYSIGLAIGTNSVGWAVITDEYKVPSKKFKVLGNTDRHSIKKNLIGALLFDSGETAEATRLKRTARRRYTRRKNRICYLQEIFSNEMAKVDDSFFHRLEESFLVEEDKKHERHPIFGNIVDEVAYHEKYPTIYHLRKKLVDSTDKADLRLIYLALAHMIKFRGHFLIEGDLNPDNSDVDKLFIQLVQTYNQLFEENPINASGVDAKAILSARLSKSRRLENLIAQLPGEKKNGLFGNLIALSLGLTPNFKSNFDLAEDAKLQLSKDTYDDDLDNLLAQIGDQYADLFLAAKNLSDAILLSDILRVNTEITKAPLSASMIKRYDEHHQDLTLLKALVRQQLPEKYKEIFFDQSKNGYAGYIDGGASQEEFYKFIKPILEKMDGTEELLVKLNREDLLRKQRTFDNGSIPHQIHLGELHAILRRQEDFYPFLKDNREKIEKILTFRIPYYVGPLARGNSRFAWMTRKSEETITPWNFEEVVDKGASAQSFIERMTNFDKNLPNEKVLPKHSLLYEYFTVYNELTKVKYVTEGMRKPAFLSGEQKKAIVDLLFKTNRKVTVKQLKEDYFKKIECFDSVEISGVEDRFNASLGTYHDLLKIIKDKDFLDNEENEDILEDIVLTLTLFEDREMIEERLKTYAHLFDDKVMKQLKRRRYTGWGRLSRKLINGIRDKQSGKTILDFLKSDGFANRNFMQLIHDDSLTFKEDIQKAQVSGQGDSLHEHIANLAGSPAIKKGILQTVKVVDELVKVMGRHKPENIVIEMARENQTTQKGQKNSRERMKRIEEGIKELGSQILKEHPVENTQLQNEKLYLYYLQNGRDMYVDQELDINRLSDYDVDHIVPQSFLKDDSIDNKVLTRSDKNRGKSDNVPSEEVVKKMKNYWRQLLNAKLITQRKFDNLTKAERGGLSELDKAGFIKRQLVETRQITKHVAQILDSRMNTKYDENDKLIREVKVITLKSKLVSDFRKDFQFYKVREINNYHHAHDAYLNAVVGTALIKKYPKLESEFVYGDYKVYDVRKMIAKSEQEGADKRTADGSEFESPKKKRKV

SEQ ID NO: 1428 - protein, 1588 aa, synthetic construct
MSEVEFSHEYWMRHALTLAKRARDEREVPVGAVLVLNNRVIGEGWNRAIGLHDPTAHAEIMALRQGGLVMQNYRLIDATLYVTFEPCVMCAGAMIHSRIGRVVFGVRNAKTGAAGSLMDVLHHPGMNHRVEITEGILADECAALLCRFFRMPRRVFNAQKKAQSSTDSGGSSGGSSGSETPGTSESATPESSGGSSGGSDKKYSIGLAIGTNSVGWAVITDEYKVPSKKFKVLGNTDRHSIKKNLIGALLFDSGETAEATRLKRTARRRYTRRKNRICYLQEIFSNEMAKVDDSFFHRLEESFLVEEDKKHERHPIFGNIVDEVAYHEKYPTIYHLRKKLVDSTDKADLRLIYLALAHMIKFRGHFLIEGDLNPDNSDVDKLFIQLVQTYNQLFEENPINASGVDAKAILSARLSKSRRLENLIAQLPGEKKNGLFGNLIALSLGLTPNFKSNFDLAEDAKLQLSKDTYDDDLDNLLAQIGDQYADLFLAAKNLSDAILLSDILRVNTEITKAPLSASMIKRYDEHHQDLTLLKALVRQQLPEKYKEIFFDQSKNGYAGYIDGGASQEEFYKFIKPILEKMDGTEELLVKLNREDLLRKQRTFDNGSIPHQIHLGELHAILRRQEDFYPFLKDNREKIEKILTFRIPYYVGPLARGNSRFAWMTRKSEETITPWNFEEVVDKGASAQSFIERMTNFDKNLPNEKVLPKHSLLYEYFTVYNELTKVKYVTEGMRKPAFLSGEQKKAIVDLLFKTNRKVTVKQLKEDYFKKIECFDSVEISGVEDRFNASLGTYHDLLKIIKDKDFLDNEENEDILEDIVLTLTLFEDREMIEERLKTYAHLFDDKVMKQLKRRRYTGWGRLSRKLINGIRDKQSGKTILDFLKSDGFANRNFMQLIHDDSLTFKEDIQKAQVSGQGDSLHEHIANLAGSPAIKKGILQTVKVVDELVKVMGRHKPENIVIEMARENQTTQKGQKNSRERMKRIEEGIKELGSQILKEHPVENTQLQNEKLYLYYLQNGRDMYVDQELDINRLSDYDVDHIVPQSFLKDDSIDNKVLTRSDKNRGKSDNVPSEEVVKKMKNYWRQLLNAKLITQRKFDNLTKAERGGLSELDKAGFIKRQLVETRQITKHVAQILDSRMNTKYDENDKLIREVKVITLKSKLVSDFRKDFQFYKVREINNYHHAHDAYLNAVVGTALIKKYPKLESEFVYGDYKVYDVRKMIAKSEQEIGKATAKYFFYSNIMNFFKTEITLANGEIRKRPLIETNGETGEIVWDKGRDFATVRKVLSMPQVNIVKKTEVQTGGFSKESILPKRNSDKLIARKKDWDPKKYGGFDSPTVAYSVLVVAKVEKGKSKKLKSVKELLGITIMERSSFEKNPIDFLEAKGYKEVKKDLIIKLPKYSLFELENGRKRMLASAGELQKGNELALPSKYVNFLYLASHYEKLKGSPEDNEQKQLFVEQHKHYLDEIIEQISEFSKRVILADANLDKVLSAYNKHRDKPIREQAENIIHLFTLTNLGAPAAFKYFDTTIDRKRYTSTKEVLDATLIHQSITGLYETRIDLSQLGGDEGADKRTADGSEFESPKKKRKV

SEQ ID NO: 1429 - protein, 1786 aa, synthetic construct
MSEVEFSHEYWMRHALTLAKRAWDEREVPVGAVLVHNNRVIGEGWNRPIGRHDPTAHAEIMALRQGGLVMQNYRLIDATLYVTLEPCVMCAGAMIHSRIGRVVFGARDAKTGAAGSLMDVLHHPGMNHRVEITEGILADECAALLSDFFRMRRQEIKAQKKAQSSTDSGGSSGGSSGSETPGTSESATPESSGGSSGGSSEVEFSHEYWMRHALTLAKRARDEREVPVGAVLVLNNRVIGEGWNRAIGLHDPTAHAEIMALRQGGLVMQNYRLIDATLYVTFEPCVMCAGAMIHSRIGRVVFGVRNAKTGAAGSLMDVLHHPGMNHRVEITEGILADECAALLCRFFRMPRRVFNAQKKAQSSTDSGGSSGGSSGSETPGTSESATPESSGGSSGGSDKKYSIGLAIGTNSVGWAVITDEYKVPSKKFKVLGNTDRHSIKKNLIGALLFDSGETAEATRLKRTARRRYTRRKNRICYLQEIFSNEMAKVDDSFFHRLEESFLVEEDKKHERHPIFGNIVDEVAYHEKYPTIYHLRKKLVDSTDKADLRLIYLALAHMIKFRGHFLIEGDLNPDNSDVDKLFIQLVQTYNQLFEENPINASGVDAKAILSARLSKSRRLENLIAQLPGEKKNGLFGNLIALSLGLTPNFKSNFDLAEDAKLQLSKDTYDDDLDNLLAQIGDQYADLFLAAKNLSDAILLSDILRVNTEITKAPLSASMIKRYDEHHQDLTLLKALVRQQLPEKYKEIFFDQSKNGYAGYIDGGASQEEFYKFIKPILEKMDGTEELLVKLNREDLLRKQRTFDNGSIPHQIHLGELHAILRRQEDFYPFLKDNREKIEKILTFRIPYYVGPLARGNSRFAWMTRKSEETITPWNFEEVVDKGASAQSFIERMTNFDKNLPNEKVLPKHSLLYEYFTVYNELTKVKYVTEGMRKPAFLSGEQKKAIVDLLFKTNRKVTVKQLKEDYFKKIECFDSVEISGVEDRFNASLGTYHDLLKIIKDKDFLDNEENEDILEDIVLTLTLFEDREMIEERLKTYAHLFDDKVMKQLKRRRYTGWGRLSRKLINGIRDKQSGKTILDFLKSDGFANRNFMQLIHDDSLTFKEDIQKAQVSGQGDSLHEHIANLAGSPAIKKGILQTVKVVDELVKVMGRHKPENIVIEMARENQTTQKGQKNSRERMKRIEEGIKELGSQILKEHPVENTQLQNEKLYLYYLQNGRDMYVDQELDINRLSDYDVDHIVPQSFLKDDSIDNKVLTRSDKNRGKSDNVPSEEVVKKMKNYWRQLLNAKLITQRKFDNLTKAERGGLSELDKAGFIKRQLVETRQITKHVAQILDSRMNTKYDENDKLIREVKVITLKSKLVSDFRKDFQFYKVREINNYHHAHDAYLNAVVGTALIKKYPKLESEFVYGDYKVYDVRKMIAKSEQEIGKATAKYFFYSNIMNFFKTEITLANGEIRKRPLIETNGETGEIVWDKGRDFATVRKVLSMPQVNIVKKTEVQTGGFSKESILPKRNSDKLIARKKDWDPKKYGGFDSPTVAYSVLVVAKVEKGKSKKLKSVKELLGITIMERSSFEKNPIDFLEAKGYKEVKKDLIIKLPKYSLFELENGRKRMLASAGELQKGNELALPSKYVNFLYLASHYEKLKGSPEDNEQKQLFVEQHKHYLDEIIEQISEFSKRVILADANLDKVLSAYNKHRDKPIREQAENIIHLFTLTNLGAPAAFKYFDTTIDRKRYTSTKEVLDATLIHQSITGLYETRIDLSQLGGDEGADKRTADGSEFESPKKKRKV

SEQ ID NO: 1430 - protein, 1588 aa, synthetic construct
MSEVEFSHEYWMRHALTLAKRARDEREVPVGAVLVLNNRVIGEGWNRAIGLHDPTAHAEIMALRQGGLVMQNYRLYDATLYVTFEPCVMCAGAMIHSRIGRVVFGVRNAKTGAAGSLMDVLHHPGMNHRVEITEGILADECAALLCRFFRMPRRVFNAQKKAQSSTDSGGSSGGSSGSETPGTSESATPESSGGSSGGSDKKYSIGLAIGTNSVGWAVITDEYKVPSKKFKVLGNTDRHSIKKNLIGALLFDSGETAEATRLKRTARRRYTRRKNRICYLQEIFSNEMAKVDDSFFHRLEESFLVEEDKKHERHPIFGNIVDEVAYHEKYPTIYHLRKKLVDSTDKADLRLIYLALAHMIKFRGHFLIEGDLNPDNSDVDKLFIQLVQTYNQLFEENPINASGVDAKAILSARLSKSRRLENLIAQLPGEKKNGLFGNLIALSLGLTPNFKSNFDLAEDAKLQLSKDTYDDDLDNLLAQIGDQYADLFLAAKNLSDAILLSDILRVNTEITKAPLSASMIKRYDEHHQDLTLLKALVRQQLPEKYKEIFFDQSKNGYAGYIDGGASQEEFYKFIKPILEKMDGTEELLVKLNREDLLRKQRTFDNGSIPHQIHLGELHAILRRQEDFYPFLKDNREKIEKILTFRIPYYVGPLARGNSRFAWMTRKSEETITPWNFEEVVDKGASAQSFIERMTNFDKNLPNEKVLPKHSLLYEYFTVYNELTKVKYVTEGMRKPAFLSGEQKKAIVDLLFKTNRKVTVKQLKEDYFKKIECFDSVEISGVEDRFNASLGTYHDLLKIIKDKDFLDNEENEDILEDIVLTLTLFEDREMIEERLKTYAHLFDDKVMKQLKRRRYTGWGRLSRKLINGIRDKQSGKTILDFLKSDGFANRNFMQLIHDDSLTFKEDIQKAQVSGQGDSLHEHIANLAGSPAIKKGILQTVKVVDELVKVMGRHKPENIVIEMARENQTTQKGQKNSRERMKRIEEGIKELGSQILKEHPVENTQLQNEKLYLYYLQNGRDMYVDQELDINRLSDYDVDHIVPQSFLKDDSIDNKVLTRSDKNRGKSDNVPSEEVVKKMKNYWRQLLNAKLITQRKFDNLTKAERGGLSELDKAGFIKRQLVETRQITKHVAQILDSRMNTKYDENDKLIREVKVITLKSKLVSDFRKDFQFYKVREINNYHHAHDAYLNAVVGTALIKKYPKLESEFVYGDYKVYDVRKMIAKSEQEIGKATAKYFFYSNIMNFFKTEITLANGEIRKRPLIETNGETGEIVWDKGRDFATVRKVLSMPQVNIVKKTEVQTGGFSKESILPKRNSDKLIARKKDWDPKKYGGFDSPTVAYSVLVVAKVEKGKSKKLKSVKELLGITIMERSSFEKNPIDFLEAKGYKEVKKDLIIKLPKYSLFELENGRKRMLASAGELQKGNELALPSKYVNFLYLASHYEKLKGSPEDNEQKQLFVEQHKHYLDEIIEQISEFSKRVILADANLDKVLSAYNKHRDKPIREQAENIIHLFTLTNLGAPAAFKYFDTTIDRKRYTSTKEVLDATLIHQSITGLYETRIDLSQLGGDEGADKRTADGSEFESPKKKRKV

SEQ ID NO: 1431 - protein, 1786 aa, synthetic construct
MSEVEFSHEYWMRHALTLAKRAWDEREVPVGAVLVHNNRVIGEGWNRPIGRHDPTAHAEIMALRQGGLVMQNYRLIDATLYVTLEPCVMCAGAMIHSRIGRVVFGARDAKTGAAGSLMDVLHHPGMNHRVEITEGILADECAALLSDFFRMRRQEIKAQKKAQSSTDSGGSSGGSSGSETPGTSESATPESSGGSSGGSSEVEFSHEYWMRHALTLAKRARDEREVPVGAVLVLNNRVIGEGWNRAIGLHDPTAHAEIMALRQGGLVMQNYRLYDATLYVTFEPCVMCAGAMIHSRIGRVVFGVRNAKTGAAGSLMDVLHHPGMNHRVEITEGILADECAALLCRFFRMPRRVFNAQKKAQSSTDSGGSSGGSSGSETPGTSESATPESSGGSSGGSDKKYSIGLAIGTNSVGWAVITDEYKVPSKKFKVLGNTDRHSIKKNLIGALLFDSGETAEATRLKRTARRRYTRRKNRICYLQEIFSNEMAKVDDSFFHRLEESFLVEEDKKHERHPIFGNIVDEVAYHEKYPTIYHLRKKLVDSTDKADLRLIYLALAHMIKFRGHFLIEGDLNPDNSDVDKLFIQLVQTYNQLFEENPINASGVDAKAILSARLSKSRRLENLIAQLPGEKKNGLFGNLIALSLGLTPNFKSNFDLAEDAKLQLSKDTYDDDLDNLLAQIGDQYADLFLAAKNLSDAILLSDILRVNTEITKAPLSASMIKRYDEHHQDLTLLKALVRQQLPEKYKEIFFDQSKNGYAGYIDGGASQEEFYKFIKPILEKMDGTEELLVKLNREDLLRKQRTFDNGSIPHQIHLGELHAILRRQEDFYPFLKDNREKIEKILTFRIPYYVGPLARGNSRFAWMTRKSEETITPWNFEEVVDKGASAQSFIERMTNFDKNLPNEKVLPKHSLLYEYFTVYNELTKVKYVTEGMRKPAFLSGEQKKAIVDLLFKTNRKVTVKQLKEDYFKKIECFDSVEISGVEDRFNASLGTYHDLLKIIKDKDFLDNEENEDILEDIVLTLTLFEDREMIEERLKTYAHLFDDKVMKQLKRRRYTGWGRLSRKLINGIRDKQSGKTILDFLKSDGFANRNFMQLIHDDSLTFKEDIQKAQVSGQGDSLHEHIANLAGSPAIKKGILQTVKVVDELVKVMGRHKPENIVIEMARENQTTQKGQKNSRERMKRIEEGIKELGSQILKEHPVENTQLQNEKLYLYYLQNGRDMYVDQELDINRLSDYDVDHIVPQSFLKDDSIDNKVLTRSDKNRGKSDNVPSEEVVKKMKNYWRQLLNAKLITQRKFDNLTKAERGGLSELDKAGFIKRQLVETRQITKHVAQILDSRMNTKYDENDKLIREVKVITLKSKLVSDFRKDFQFYKVREINNYHHAHDAYLNAVVGTALIKKYPKLESEFVYGDYKVYDVRKMIAKSEQEIGKATAKYFFYSNIMNFFKTEITLANGEIRKRPLIETNGETGEIVWDKGRDFATVRKVLSMPQVNIVKKTEVQTGGFSKESILPKRNSDKLIARKKDWDPKKYGGFDSPTVAYSVLVVAKVEKGKSKKLKSVKELLGITIMERSSFEKNPIDFLEAKGYKEVKKDLIIKLPKYSLFELENGRKRMLASAGELQKGNELALPSKYVNFLYLASHYEKLKGSPEDNEQKQLFVEQHKHYLDEIIEQISEFSKRVILADANLDKVLSAYNKHRDKPIREQAENIIHLFTLTNLGAPAAFKYFDTTIDRKRYTSTKEVLDATLIHQSITGLYETRIDLSQLGGDEGADKRTADGSEFESPKKKRKV

SEQ ID NO: 1432 - protein, 1588 aa, synthetic construct
MSEVEFSHEYWMRHALTLAKRARDEREVPVGAVLVLNNRVIGEGWNRAIGLHDPTAHAEIMALRQGGLVMQNYRLIDATLYSTFEPCVMCAGAMIHSRIGRVVFGVRNAKTGAAGSLMDVLHYPGMNHRVEITEGILADECAALLCYFFRMPRRVFNAQKKAQSSTDSGGSSGGSSGSETPGTSESATPESSGGSSGGSDKKYSIGLAIGTNSVGWAVITDEYKVPSKKFKVLGNTDRHSIKKNLIGALLFDSGETAEATRLKRTARRRYTRRKNRICYLQEIFSNEMAKVDDSFFHRLEESFLVEEDKKHERHPIFGNIVDEVAYHEKYPTIYHLRKKLVDSTDKADLRLIYLALAHMIKFRGHFLIEGDLNPDNSDVDKLFIQLVQTYNQLFEENPINASGVDAKAILSARLSKSRRLENLIAQLPGEKKNGLFGNLIALSLGLTPNFKSNFDLAEDAKLQLSKDTYDDDLDNLLAQIGDQYADLFLAAKNLSDAILLSDILRVNTEITKAPLSASMIKRYDEHHQDLTLLKALVRQQLPEKYKEIFFDQSKNGYAGYIDGGASQEEFYKFIKPILEKMDGTEELLVKLNREDLLRKQRTFDNGSIPHQIHLGELHAILRRQEDFYPFLKDNREKIEKILTFRIPYYVGPLARGNSRFAWMTRKSEETITPWNFEEVVDKGASAQSFIERMTNFDKNLPNEKVLPKHSLLYEYFTVYNELTKVKYVTEGMRKPAFLSGEQKKAIVDLLFKTNRKVTVKQLKEDYFKKIECFDSVEISGVEDRFNASLGTYHDLLKIIKDKDFLDNEENEDILEDIVLTLTLFEDREMIEERLKTYAHLFDDKVMKQLKRRRYTGWGRLSRKLINGIRDKQSGKTILDFLKSDGFANRNFMQLIHDDSLTFKEDIQKAQVSGQGDSLHEHIANLAGSPAIKKGILQTVKVVDELVKVMGRHKPENIVIEMARENQTTQKGQKNSRERMKRIEEGIKELGSQILKEHPVENTQLQNEKLYLYYLQNGRDMYVDQELDINRLSDYDVDHIVPQSFLKDDSIDNKVLTRSDKNRGKSDNVPSEEVVKKMKNYWRQLLNAKLITQRKFDNLTKAERGGLSELDKAGFIKRQLVETRQITKHVAQILDSRMNTKYDENDKLIREVKVITLKSKLVSDFRKDFQFYKVREINNYHHAHDAYLNAVVGTALIKKYPKLESEFVYGDYKVYDVRKMIAKSEQEIGKATAKYFFYSNIMNFFKTEITLANGEIRKRPLIETNGETGEIVWDKGRDFATVRKVLSMPQVNIVKKTEVQTGGFSKESILPKRNSDKLIARKKDWDPKKYGGFDSPTVAYSVLVVAKVEKGKSKKLKSVKELLGITIMERSSFEKNPIDFLEAKGYKEVKKDLIIKLPKYSLFELENGRKRMLASAGELQKGNELALPSKYVNFLYLASHYEKLKGSPEDNEQKQLFVEQHKHYLDEIIEQISEFSKRVILADANLDKVLSAYNKHRDKPIREQAENIIHLFTLTNLGAPAAFKYFDTTIDRKRYTSTKEVLDATLIHQSITGLYETRIDLSQLGGDEGADKRTADGSEFESPKKKRKV

SEQ ID NO: 1433 - protein, 1786 aa, synthetic construct
MSEVEFSHEYWMRHALTLAKRAWDEREVPVGAVLVHNNRVIGEGWNRPIGRHDPTAHAEIMALRQGGLVMQNYRLIDATLYVTLEPCVMCAGAMIHSRIGRVVFGARDAKTGAAGSLMDVLHHPGMNHRVEITEGILADECAALLSDFFRMRRQEIKAQKKAQSSTDSGGSSGGSSGSETPGTSESATPESSGGSSGGSSEVEFSHEYWMRHALTLAKRARDEREVPVGAVLVLNNRVIGEGWNRAIGLHDPTAHAEIMALRQGGLVMQNYRLIDATLYSTFEPCVMCAGAMIHSRIGRVVFGVRNAKTGAAGSLMDVLHYPGMNHRVEITEGILADECAALLCYFFRMPRRVFNAQKKAQSSTDSGGSSGGSSGSETPGTSESATPESSGGSSGGSDKKYSIGLAIGTNSVGWAVITDEYKVPSKKFKVLGNTDRHSIKKNLIGALLFDSGETAEATRLKRTARRRYTRRKNRICYLQEIFSNEMAKVDDSFFHRLEESFLVEEDKKHERHPIFGNIVDEVAYHEKYPTIYHLRKKLVDSTDKADLRLIYLALAHMIKFRGHFLIEGDLNPDNSDVDKLFIQLVQTYNQLFEENPINASGVDAKAILSARLSKSRRLENLIAQLPGEKKNGLFGNLIALSLGLTPNFKSNFDLAEDAKLQLSKDTYDDDLDNLLAQIGDQYADLFLAAKNLSDAILLSDILRVNTEITKAPLSASMIKRYDEHHQDLTLLKALVRQQLPEKYKEIFFDQSKNGYAGYIDGGASQEEFYKFIKPILEKMDGTEELLVKLNREDLLRKQRTFDNGSIPHQIHLGELHAILRRQEDFYPFLKDNREKIEKILTFRIPYYVGPLARGNSRFAWMTRKSEETITPWNFEEVVDKGASAQSFIERMTNFDKNLPNEKVLPKHSLLYEYFTVYNELTKVKYVTEGMRKPAFLSGEQKKAIVDLLFKTNRKVTVKQLKEDYFKKIECFDSVEISGVEDRFNASLGTYHDLLKIIKDKDFLDNEENEDILEDIVLTLTLFEDREMIEERLKTYAHLFDDKVMKQLKRRRYTGWGRLSRKLINGIRDKQSGKTILDFLKSDGFANRNFMQLIHDDSLTFKEDIQKAQVSGQGDSLHEHIANLAGSPAIKKGILQTVKVVDELVKVMGRHKPENIVIEMARENQTTQKGQKNSRERMKRIEEGIKELGSQILKEHPVENTQLQNEKLYLYYLQNGRDMYVDQELDINRLSDYDVDHIVPQSFLKDDSIDNKVLTRSDKNRGKSDNVPSEEVVKKMKNYWRQLLNAKLITQRKFDNLTKAERGGLSELDKAGFIKRQLVETRQITKHVAQILDSRMNTKYDENDKLIREVKVITLKSKLVSDFRKDFQFYKVREINNYHHAHDAYLNAVVGTALIKKYPKLESEFVYGDYKVYDVRKMIAKSEQEIGKATAKYFFYSNIMNFFKTEITLANGEIRKRPLIETNGETGEIVWDKGRDFATVRKVLSMPQVNIVKKTEVQTGGFSKESILPKRNSDKLIARKKDWDPKKYGGFDSPTVAYSVLVVAKVEKGKSKKLKSVKELLGITIMERSSFEKNPIDFLEAKGYKEVKKDLIIKLPKYSLFELENGRKRMLASAGELQKGNELALPSKYVNFLYLASHYEKLKGSPEDNEQKQLFVEQHKHYLDEIIEQISEFSKRVILADANLDKVLSAYNKHRDKPIREQAENIIHLFTLTNLGAPAAFKYFDTTIDRKRYTSTKEVLDATLIHQSITGLYETRIDLSQLGGDEGADKRTADGSEFESPKKKRKV

SEQ ID NO: 1434 - protein, 1588 aa, synthetic construct
MSEVEFSHEYWMRHALTLAKRARDEREVPVGAVLVLNNRVIGEGWNRAIGLHDPTAHAEIMALRQGGLVMQNYRLYDATLYSTFEPCVMCAGAMIHSRIGRVVFGVRNAKTGAAGSLMDVLHHPGMNHRVEITEGILADECAALLCRFFRMPRRVFNAQKKAQSSTDSGGSSGGSSGSETPGTSESATPESSGGSSGGSDKKYSIGLAIGTNSVGWAVITDEYKVPSKKFKVLGNTDRHSIKKNLIGALLFDSGETAEATRLKRTARRRYTRRKNRICYLQEIFSNEMAKVDDSFFHRLEESFLVEEDKKHERHPIFGNIVDEVAYHEKYPTIYHLRKKLVDSTDKADLRLIYLALAHMIKFRGHFLIEGDLNPDNSDVDKLFIQLVQTYNQLFEENPINASGVDAKAILSARLSKSRRLENLIAQLPGEKKNGLFGNLIALSLGLTPNFKSNFDLAEDAKLQLSKDTYDDDLDNLLAQIGDQYADLFLAAKNLSDAILLSDILRVNTEITKAPLSASMIKRYDEHHQDLTLLKALVRQQLPEKYKEIFFDQSKNGYAGYIDGGASQEEFYKFIKPILEKMDGTEELLVKLNREDLLRKQRTFDNGSIPHQIHLGELHAILRRQEDFYPFLKDNREKIEKILTFRIPYYVGPLARGNSRFAWMTRKSEETITPWNFEEVVDKGASAQSFIERMTNFDKNLPNEKVLPKHSLLYEYFTVYNELTKVKYVTEGMRKPAFLSGEQKKAIVDLLFKTNRKVTVKQLKEDYFKKIECFDSVEISGVEDRFNASLGTYHDLLKIIKDKDFLDNEENEDILEDIVLTLTLFEDREMIEERLKTYAHLFDDKVMKQLKRRRYTGWGRLSRKLINGIRDKQSGKTILDFLKSDGFANRNFMQLIHDDSLTFKEDIQKAQVSGQGDSLHEHIANLAGSPAIKKGILQTVKVVDELVKVMGRHKPENIVIEMARENQTTQKGQKNSRERMKRIEEGIKELGSQILKEHPVENTQLQNEKLYLYYLQNGRDMYVDQELDINRLSDYDVDHIVPQSFLKDDSIDNKVLTRSDKNRGKSDNVPSEEVVKKMKNYWRQLLNAKLITQRKFDNLTKAERGGLSELDKAGFIKRQLVETRQITKHVAQILDSRMNTKYDENDKLIREVKVITLKSKLVSDFRKDFQFYKVREINNYHHAHDAYLNAVVGTALIKKYPKLESEFVYGDYKVYDVRKMIAKSEQEIGKATAKYFFYSNIMNFFKTEITLANGEIRKRPLIETNGETGEIVWDKGRDFATVRKVLSMPQVNIVKKTEVQTGGFSKESILPKRNSDKLIARKKDWDPKKYGGFDSPTVAYSVLVVAKVEKGKSKKLKSVKELLGITIMERSSFEKNPIDFLEAKGYKEVKKDLIIKLPKYSLFELENGRKRMLASAGELQKGNELALPSKYVNFLYLASHYEKLKGSPEDNEQKQLFVEQHKHYLDEIIEQISEFSKRVILADANLDKVLSAYNKHRDKPIREQAENIIHLFTLTNLGAPAAFKYFDTTIDRKRYTSTKEVLDATLIHQSITGLYETRIDLSQLGGDEGADKRTADGSEFESPKKKRKV

SEQ ID NO: 1435 - protein, 1786 aa, synthetic construct
MSEVEFSHEYWMRHALTLAKRAWDEREVPVGAVLVHNNRVIGEGWNRPIGRHDPTAHAEIMALRQGGLVMQNYRLIDATLYVTLEPCVMCAGAMIHSRIGRVVFGARDAKTGAAGSLMDVLHHPGMNHRVEITEGILADECAALLSDFFRMRRQEIKAQKKAQSSTDSGGSSGGSSGSETPGTSESATPESSGGSSGGSSEVEFSHEYWMRHALTLAKRARDEREVPVGAVLVLNNRVIGEGWNRAIGLHDPTAHAEIMALRQGGLVMQNYRLYDATLYSTFEPCVMCAGAMIHSRIGRVVFGVRNAKTGAAGSLMDVLHHPGMNHRVEITEGILADECAALLCRFFRMPRRVFNAQKKAQSSTDSGGSSGGSSGSETPGTSESATPESSGGSSGGSDKKYSIGLAIGTNSVGWAVITDEYKVPSKKFKVLGNTDRHSIKKNLIGALLFDSGETAEATRLKRTARRRYTRRKNRICYLQEIFSNEMAKVDDSFFHRLEESFLVEEDKKHERHPIFGNIVDEVAYHEKYPTIYHLRKKLVDSTDKADLRLIYLALAHMIKFRGHFLIEGDLNPDNSDVDKLFIQLVQTYNQLFEENPINASGVDAKAILSARLSKSRRLENLIAQLPGEKKNGLFGNLIALSLGLTPNFKSNFDLAEDAKLQLSKDTYDDDLDNLLAQIGDQYADLFLAAKNLSDAILLSDILRVNTEITKAPLSASMIKRYDEHHQDLTLLKALVRQQLPEKYKEIFFDQSKNGYAGYIDGGASQEEFYKFIKPILEKMDGTEELLVKLNREDLLRKQRTFDNGSIPHQIHLGELHAILRRQEDFYPFLKDNREKIEKILTFRIPYYVGPLARGNSRFAWMTRKSEETITPWNFEEVVDKGASAQSFIERMTNFDKNLPNEKVLPKHSLLYEYFTVYNELTKVKYVTEGMRKPAFLSGEQKKAIVDLLFKTNRKVTVKQLKEDYFKKIECFDSVEISGVEDRFNASLGTYHDLLKIIKDKDFLDNEENEDILEDIVLTLTLFEDREMIEERLKTYAHLFDDKVMKQLKRRRYTGWGRLSRKLINGIRDKQSGKTILDFLKSDGFANRNFMQLIHDDSLTFKEDIQKAQVSGQGDSLHEHIANLAGSPAIKKGILQTVKVVDELVKVMGRHKPENIVIEMARENQTTQKGQKNSRERMKRIEEGIKELGSQILKEHPVENTQLQNEKLYLYYLQNGRDMYVDQELDINRLSDYDVDHIVPQSFLKDDSIDNKVLTRSDKNRGKSDNVPSEEVVKKMKNYWRQLLNAKLITQRKFDNLTKAERGGLSELDKAGFIKRQLVETRQITKHVAQILDSRMNTKYDENDKLIREVKVITLKSKLVSDFRKDFQFYKVREINNYHHAHDAYLNAVVGTALIKKYPKLESEFVYGDYKVYDVRKMIAKSEQEIGKATAKYFFYSNIMNFFKTEITLANGEIRKRPLIETNGETGEIVWDKGRDFATVRKVLSMPQVNIVKKTEVQTGGFSKESILPKRNSDKLIARKKDWDPKKYGGFDSPTVAYSVLVVAKVEKGKSKKLKSVKELLGITIMERSSFEKNPIDFLEAKGYKEVKKDLIIKLPKYSLFELENGRKRMLASAGELQKGNELALPSKYVNFLYLASHYEKLKGSPEDNEQKQLFVEQHKHYLDEIIEQISEFSKRVILADANLDKVLSAYNKHRDKPIREQAENIIHLFTLTNLGAPAAFKYFDTTIDRKRYTSTKEVLDATLIHQSITGLYETRIDLSQLGGDEGADKRTADGSEFESPKKKRKV

SEQ ID NO: 1436 - protein, 1588 aa, synthetic construct
MSEVEFSHEYWMRHALTLAKRARDEREVPVGAVLVLNNRVIGEGWNRAIGLHDPTAHAEIMALRQGGLVMQNYRLIDATLYVTFEPCVMCAGAMIHSRIGRVVFGVRNAKTGAAGSLMDVLHYPGMNHRVEITEGILADECAALLCTFFRMPRQVFNAQKKAQSSTDSGGSSGGSSGSETPGTSESATPESSGGSSGGSDKKYSIGLAIGTNSVGWAVITDEYKVPSKKFKVLGNTDRHSIKKNLIGALLFDSGETAEATRLKRTARRRYTRRKNRICYLQEIFSNEMAKVDDSFFHRLEESFLVEEDKKHERHPIFGNIVDEVAYHEKYPTIYHLRKKLVDSTDKADLRLIYLALAHMIKFRGHFLIEGDLNPDNSDVDKLFIQLVQTYNQLFEENPINASGVDAKAILSARLSKSRRLENLIAQLPGEKKNGLFGNLIALSLGLTPNFKSNFDLAEDAKLQLSKDTYDDDLDNLLAQIGDQYADLFLAAKNLSDAILLSDILRVNTEITKAPLSASMIKRYDEHHQDLTLLKALVRQQLPEKYKEIFFDQSKNGYAGYIDGGASQEEFYKFIKPILEKMDGTEELLVKLNREDLLRKQRTFDNGSIPHQIHLGELHAILRRQEDFYPFLKDNREKIEKILTFRIPYYVGPLARGNSRFAWMTRKSEETITPWNFEEVVDKGASAQSFIERMTNFDKNLPNEKVLPKHSLLYEYFTVYNELTKVKYVTEGMRKPAFLSGEQKKAIVDLLFKTNRKVTVKQLKEDYFKKIECFDSVEISGVEDRFNASLGTYHDLLKIIKDKDFLDNEENEDILEDIVLTLTLFEDREMIEERLKTYAHLFDDKVMKQLKRRRYTGWGRLSRKLINGIRDKQSGKTILDFLKSDGFANRNFMQLIHDDSLTFKEDIQKAQVSGQGDSLHEHIANLAGSPAIKKGILQTVKVVDELVKVMGRHKPENIVIEMARENQTTQKGQKNSRERMKRIEEGIKELGSQILKEHPVENTQLQNEKLYLYYLQNGRDMYVDQELDINRLSDYDVDHIVPQSFLKDDSIDNKVLTRSDKNRGKSDNVPSEEVVKKMKNYWRQLLNAKLITQRKFDNLTKAERGGLSELDKAGFIKRQLVETRQITKHVAQILDSRMNTKYDENDKLIREVKVITLKSKLVSDFRKDFQFYKVREINNYHHAHDAYLNAVVGTALIKKYPKLESEFVYGDYKVYDVRKMIAKSEQEIGKATAKYFFYSNIMNFFKTEITLANGEIRKRPLIETNGETGEIVWDKGRDFATVRKVLSMPQVNIVKKTEVQTGGFSKESILPKRNSDKLIARKKDWDPKKYGGFVSPTVAYSVLVVAKVEKGKSKKLKSVKELLGITIMERSSFEKNPIDFLEAKGYKEVKKDLIIKLPKYSLFELENGRKRMLASARELQKGNELALPSKYVNFLYLASHYEKLKGSPEDNEQKQLFVEQHKHYLDEIIEQISEFSKRVILADANLDKVLSAYNKHRDKPIREQAENIIHLFTLTNLGAPAAFKYFDTTIDRKQYRSTKEVLDATLIHQSITGLYETRIDLSQLGGDEGADKRTADGSEFESPKKKRKV

SEQ ID NO: 1437 - protein, 1588 aa, synthetic construct
MSEVEFSHEYWMRHALTLAKRARDEREVPVGAVLVLNNRVIGEGWNRAIGLHDPTAHAEIMALRQGGLVMQNYRLIDATLYVTFEPCVMCAGAMIHSRIGRVVFGVRNAKTGAAGSLMDVLHYPGMNHRVEITEGILADECAALLCRFFRMPRQVFNAQKKAQSSTDSGGSSGGSSGSETPGTSESATPESSGGSSGGSDKKYSIGLAIGTNSVGWAVITDEYKVPSKKFKVLGNTDRHSIKKNLIGALLFDSGETAEATRLKRTARRRYTRRKNRICYLQEIFSNEMAKVDDSFFHRLEESFLVEEDKKHERHPIFGNIVDEVAYHEKYPTIYHLRKKLVDSTDKADLRLIYLALAHMIKFRGHFLIEGDLNPDNSDVDKLFIQLVQTYNQLFEENPINASGVDAKAILSARLSKSRRLENLIAQLPGEKKNGLFGNLIALSLGLTPNFKSNFDLAEDAKLQLSKDTYDDDLDNLLAQIGDQYADLFLAAKNLSDAILLSDILRVNTEITKAPLSASMIKRYDEHHQDLTLLKALVRQQLPEKYKEIFFDQSKNGYAGYIDGGASQEEFYKFIKPILEKMDGTEELLVKLNREDLLRKQRTFDNGSIPHQIHLGELHAILRRQEDFYPFLKDNREKIEKILTFRIPYYVGPLARGNSRFAWMTRKSEETITPWNFEEVVDKGASAQSFIERMTNFDKNLPNEKVLPKHSLLYEYFTVYNELTKVKYVTEGMRKPAFLSGEQKKAIVDLLFKTNRKVTVKQLKEDYFKKIECFDSVEISGVEDRFNASLGTYHDLLKIIKDKDFLDNEENEDILEDIVLTLTLFEDREMIEERLKTYAHLFDDKVMKQLKRRRYTGWGRLSRKLINGIRDKQSGKTILDFLKSDGFANRNFMQLIHDDSLTFKEDIQKAQVSGQGDSLHEHIANLAGSPAIKKGILQTVKVVDELVKVMGRHKPENIVIEMARENQTTQKGQKNSRERMKRIEEGIKELGSQILKEHPVENTQLQNEKLYLYYLQNGRDMYVDQELDINRLSDYDVDHIVPQSFLKDDSIDNKVLTRSDKNRGKSDNVPSEEVVKKMKNYWRQLLNAKLITQRKFDNLTKAERGGLSELDKAGFIKRQLVETRQITKHVAQILDSRMNTKYDENDKLIREVKVITLKSKLVSDFRKDFQFYKVREINNYHHAHDAYLNAVVGTALIKKYPKLESEFVYGDYKVYDVRKMIAKSEQEIGKATAKYFFYSNIMNFFKTEITLANGEIRKRPLIETNGETGEIVWDKGRDFATVRKVLSMPQVNIVKKTEVQTGGFSKESILPKRNSDKLIARKKDWDPKKYGGFVSPTVAYSVLVVAKVEKGKSKKLKSVKELLGITIMERSSFEKNPIDFLEAKGYKEVKKDLIIKLPKYSLFELENGRKRMLASARELQKGNELALPSKYVNFLYLASHYEKLKGSPEDNEQKQLFVEQHKHYLDEIIEQISEFSKRVILADANLDKVLSAYNKHRDKPIREQAENIIHLFTLTNLGAPAAFKYFDTTIDRKQYRSTKEVLDATLIHQSITGLYETRIDLSQLGGDEGADKRTADGSEFESPKKKRKV

SEQ ID NO: 1438 - protein, 1588 aa, synthetic construct
MSEVEFSHEYWMRHALTLAKRARDEREVPVGAVLVLNNRVIGEGWNRAIGLHDPTAHAEIMALRQGGLVMQNYRLIDATLYVTFEPCVMCAGAMIHSRIGRVVFGVRNAKTGAAGSLMDVLHYPGMNHRVEITEGILADECAALLCYFFRMPRSVFNAQKKAQSSTDSGGSSGGSSGSETPGTSESATPESSGGSSGGSDKKYSIGLAIGTNSVGWAVITDEYKVPSKKFKVLGNTDRHSIKKNLIGALLFDSGETAEATRLKRTARRRYTRRKNRICYLQEIFSNEMAKVDDSFFHRLEESFLVEEDKKHERHPIFGNIVDEVAYHEKYPTIYHLRKKLVDSTDKADLRLIYLALAHMIKFRGHFLIEGDLNPDNSDVDKLFIQLVQTYNQLFEENPINASGVDAKAILSARLSKSRRLENLIAQLPGEKKNGLFGNLIALSLGLTPNFKSNFDLAEDAKLQLSKDTYDDDLDNLLAQIGDQYADLFLAAKNLSDAILLSDILRVNTEITKAPLSASMIKRYDEHHQDLTLLKALVRQQLPEKYKEIFFDQSKNGYAGYIDGGASQEEFYKFIKPILEKMDGTEELLVKLNREDLLRKQRTFDNGSIPHQIHLGELHAILRRQEDFYPFLKDNREKIEKILTFRIPYYVGPLARGNSRFAWMTRKSEETITPWNFEEVVDKGASAQSFIERMTNFDKNLPNEKVLPKHSLLYEYFTVYNELTKVKYVTEGMRKPAFLSGEQKKAIVDLLFKTNRKVTVKQLKEDYFKKIECFDSVEISGVEDRFNASLGTYHDLLKIIKDKDFLDNEENEDILEDIVLTLTLFEDREMIEERLKTYAHLFDDKVMKQLKRRRYTGWGRLSRKLINGIRDKQSGKTILDFLKSDGFANRNFMQLIHDDSLTFKEDIQKAQVSGQGDSLHEHIANLAGSPAIKKGILQTVKVVDELVKVMGRHKPENIVIEMARENQTTQKGQKNSRERMKRIEEGIKELGSQILKEHPVENTQLQNEKLYLYYLQNGRDMYVDQELDINRLSDYDVDHIVPQSFLKDDSIDNKVLTRSDKNRGKSDNVPSEEVVKKMKNYWRQLLNAKLITQRKFDNLTKAERGGLSELDKAGFIKRQLVETRQITKHVAQILDSRMNTKYDENDKLIREVKVITLKSKLVSDFRKDFQFYKVREINNYHHAHDAYLNAVVGTALIKKYPKLESEFVYGDYKVYDVRKMIAKSEQEIGKATAKYFFYSNIMNFFKTEITLANGEIRKRPLIETNGETGEIVWDKGRDFATVRKVLSMPQVNIVKKTEVQTGGFSKESILPKRNSDKLIARKKDWDPKKYGGFVSPTVAYSVLVVAKVEKGKSKKLKSVKELLGITIMERSSFEKNPIDFLEAKGYKEVKKDLIIKLPKYSLFELENGRKRMLASARELQKGNELALPSKYVNFLYLASHYEKLKGSPEDNEQKQLFVEQHKHYLDEIIEQISEFSKRVILADANLDKVLSAYNKHRDKPIREQAENIIHLFTLTNLGAPAAFKYFDTTIDRKQYRSTKEVLDATLIHQSITGLYETRIDLSQLGGDEGADKRTADGSEFESPKKKRKV

SEQ ID NO: 1439 - protein, 1588 aa, synthetic construct
MSEVEFSHEYWMRHALTLAKRARDEREVPVGAVLVLNNRVIGEGWNRAIGLHDPTAHAEIMALRQGGLVMQNYRLIDATLYVTFEPCVMCAGAMIHSRIGRVVFGVRNAKTGAAGSLMDVLHHPGMNHRVEITEGILADECAALLCYFFRMPRQVFNAQKKAQSSTDSGGSSGGSSGSETPGTSESATPESSGGSSGGSDKKYSIGLAIGTNSVGWAVITDEYKVPSKKFKVLGNTDRHSIKKNLIGALLFDSGETAEATRLKRTARRRYTRRKNRICYLQEIFSNEMAKVDDSFFHRLEESFLVEEDKKHERHPIFGNIVDEVAYHEKYPTIYHLRKKLVDSTDKADLRLIYLALAHMIKFRGHFLIEGDLNPDNSDVDKLFIQLVQTYNQLFEENPINASGVDAKAILSARLSKSRRLENLIAQLPGEKKNGLFGNLIALSLGLTPNFKSNFDLAEDAKLQLSKDTYDDDLDNLLAQIGDQYADLFLAAKNLSDAILLSDILRVNTEITKAPLSASMIKRYDEHHQDLTLLKALVRQQLPEKYKEIFFDQSKNGYAGYIDGGASQEEFYKFIKPILEKMDGTEELLVKLNREDLLRKQRTFDNGSIPHQIHLGELHAILRRQEDFYPFLKDNREKIEKILTFRIPYYVGPLARGNSRFAWMTRKSEETITPWNFEEVVDKGASAQSFIERMTNFDKNLPNEKVLPKHSLLYEYFTVYNELTKVKYVTEGMRKPAFLSGEQKKAIVDLLFKTNRKVTVKQLKEDYFKKIECFDSVEISGVEDRFNASLGTYHDLLKIIKDKDFLDNEENEDILEDIVLTLTLFEDREMIEERLKTYAHLFDDKVMKQLKRRRYTGWGRLSRKLINGIRDKQSGKTILDFLKSDGFANRNFMQLIHDDSLTFKEDIQKAQVSGQGDSLHEHIANLAGSPAIKKGILQTVKVVDELVKVMGRHKPENIVIEMARENQTTQKGQKNSRERMKRIEEGIKELGSQILKEHPVENTQLQNEKLYLYYLQNGRDMYVDQELDINRLSDYDVDHIVPQSFLKDDSIDNKVLTRSDKNRGKSDNVPSEEVVKKMKNYWRQLLNAKLITQRKFDNLTKAERGGLSELDKAGFIKRQLVETRQITKHVAQILDSRMNTKYDENDKLIREVKVITLKSKLVSDFRKDFQFYKVREINNYHHAHDAYLNAVVGTALIKKYPKLESEFVYGDYKVYDVRKMIAKSEQEIGKATAKYFFYSNIMNFFKTEITLANGEIRKRPLIETNGETGEIVWDKGRDFATVRKVLSMPQVNIVKKTEVQTGGFSKESILPKRNSDKLIARKKDWDPKKYGGFVSPTVAYSVLVVAKVEKGKSKKLKSVKELLGITIMERSSFEKNPIDFLEAKGYKEVKKDLIIKLPKYSLFELENGRKRMLASARELQKGNELALPSKYVNFLYLASHYEKLKGSPEDNEQKQLFVEQHKHYLDEIIEQISEFSKRVILADANLDKVLSAYNKHRDKPIREQAENIIHLFTLTNLGAPAAFKYFDTTIDRKQYRSTKEVLDATLIHQSITGLYETRIDLSQLGGDEGADKRTADGSEFESPKKKRKV

SEQ ID NO: 1440 - protein, 1588 aa, synthetic construct
MSEVEFSHEYWMRHALTLAKRARDEREVPVGAVLVLNNRVIGEGWNRAIGLHDPTAHAEIMALRQGGLVMQNYRLIDATLYSTFEPCVMCAGAMIHSRIGRVVFGVRNAKTGAAGSLMDVLHYPGMNHRVEITEGILADECAALLCYFFRMPRQVFNAQKKAQSSTDSGGSSGGSSGSETPGTSESATPESSGGSSGGSDKKYSIGLAIGTNSVGWAVITDEYKVPSKKFKVLGNTDRHSIKKNLIGALLFDSGETAEATRLKRTARRRYTRRKNRICYLQEIFSNEMAKVDDSFFHRLEESFLVEEDKKHERHPIFGNIVDEVAYHEKYPTIYHLRKKLVDSTDKADLRLIYLALAHMIKFRGHFLIEGDLNPDNSDVDKLFIQLVQTYNQLFEENPINASGVDAKAILSARLSKSRRLENLIAQLPGEKKNGLFGNLIALSLGLTPNFKSNFDLAEDAKLQLSKDTYDDDLDNLLAQIGDQYADLFLAAKNLSDAILLSDILRVNTEITKAPLSASMIKRYDEHHQDLTLLKALVRQQLPEKYKEIFFDQSKNGYAGYIDGGASQEEFYKFIKPILEKMDGTEELLVKLNREDLLRKQRTFDNGSIPHQIHLGELHAILRRQEDFYPFLKDNREKIEKILTFRIPYYVGPLARGNSRFAWMTRKSEETITPWNFEEVVDKGASAQSFIERMTNFDKNLPNEKVLPKHSLLYEYFTVYNELTKVKYVTEGMRKPAFLSGEQKKAIVDLLFKTNRKVTVKQLKEDYFKKIECFDSVEISGVEDRFNASLGTYHDLLKIIKDKDFLDNEENEDILEDIVLTLTLFEDREMIEERLKTYAHLFDDKVMKQLKRRRYTGWGRLSRKLINGIRDKQSGKTILDFLKSDGFANRNFMQLIHDDSLTFKEDIQKAQVSGQGDSLHEHIANLAGSPAIKKGILQTVKVVDELVKVMGRHKPENIVIEMARENQTTQKGQKNSRERMKRIEEGIKELGSQILKEHPVENTQLQNEKLYLYYLQNGRDMYVDQELDINRLSDYDVDHIVPQSFLKDDSIDNKVLTRSDKNRGKSDNVPSEEVVKKMKNYWRQLLNAKLITQRKFDNLTKAERGGLSELDKAGFIKRQLVETRQITKHVAQILDSRMNTKYDENDKLIREVKVITLKSKLVSDFRKDFQFYKVREINNYHHAHDAYLNAVVGTALIKKYPKLESEFVYGDYKVYDVRKMIAKSEQEIGKATAKYFFYSNIMNFFKTEITLANGEIRKRPLIETNGETGEIVWDKGRDFATVRKVLSMPQVNIVKKTEVQTGGFSKESILPKRNSDKLIARKKDWDPKKYGGFVSPTVAYSVLVVAKVEKGKSKKLKSVKELLGITIMERSSFEKNPIDFLEAKGYKEVKKDLIIKLPKYSLFELENGRKRMLASARELQKGNELALPSKYVNFLYLASHYEKLKGSPEDNEQKQLFVEQHKHYLDEIIEQISEFSKRVILADANLDKVLSAYNKHRDKPIREQAENIIHLFTLTNLGAPAAFKYFDTTIDRKQYRSTKEVLDATLIHQSITGLYETRIDLSQLGGDEGADKRTADGSEFESPKKKRKV

SEQ ID NO: 1441 - protein, 1588 aa, synthetic construct
MSEVEFSHEYWMRHALTLAKRARDEREVPVGAVLVLNNRVIGEGWNRAIGLHDPTAHAEIMALRQGGLVMQNYRLIDATLYVTFEPCVMCAGAMIHSRIGRVVFGVRNAKTGAAGSLMDVLHYPGMNHRVEITEGILADECAALLCYFFRMPRQVFNAQKKAQSSRDSGGSSGGSSGSETPGTSESATPESSGGSSGGSDKKYSIGLAIGTNSVGWAVITDEYKVPSKKFKVLGNTDRHSIKKNLIGALLFDSGETAEATRLKRTARRRYTRRKNRICYLQEIFSNEMAKVDDSFFHRLEESFLVEEDKKHERHPIFGNIVDEVAYHEKYPTIYHLRKKLVDSTDKADLRLIYLALAHMIKFRGHFLIEGDLNPDNSDVDKLFIQLVQTYNQLFEENPINASGVDAKAILSARLSKSRRLENLIAQLPGEKKNGLFGNLIALSLGLTPNFKSNFDLAEDAKLQLSKDTYDDDLDNLLAQIGDQYADLFLAAKNLSDAILLSDILRVNTEITKAPLSASMIKRYDEHHQDLTLLKALVRQQLPEKYKEIFFDQSKNGYAGYIDGGASQEEFYKFIKPILEKMDGTEELLVKLNREDLLRKQRTFDNGSIPHQIHLGELHAILRRQEDFYPFLKDNREKIEKILTFRIPYYVGPLARGNSRFAWMTRKSEETITPWNFEEVVDKGASAQSFIERMTNFDKNLPNEKVLPKHSLLYEYFTVYNELTKVKYVTEGMRKPAFLSGEQKKAIVDLLFKTNRKVTVKQLKEDYFKKIECFDSVEISGVEDRFNASLGTYHDLLKIIKDKDFLDNEENEDILEDIVLTLTLFEDREMIEERLKTYAHLFDDKVMKQLKRRRYTGWGRLSRKLINGIRDKQSGKTILDFLKSDGFANRNFMQLIHDDSLTFKEDIQKAQVSGQGDSLHEHIANLAGSPAIKKGILQTVKVVDELVKVMGRHKPENIVIEMARENQTTQKGQKNSRERMKRIEEGIKELGSQILKEHPVENTQLQNEKLYLYYLQNGRDMYVDQELDINRLSDYDVDHIVPQSFLKDDSIDNKVLTRSDKNRGKSDNVPSEEVVKKMKNYWRQLLNAKLITQRKFDNLTKAERGGLSELDKAGFIKRQLVETRQITKHVAQILDSRMNTKYDENDKLIREVKVITLKSKLVSDFRKDFQFYKVREINNYHHAHDAYLNAVVGTALIKKYPKLESEFVYGDYKVYDVRKMIAKSEQEIGKATAKYFFYSNIMNFFKTEITLANGEIRKRPLIETNGETGEIVWDKGRDFATVRKVLSMPQVNIVKKTEVQTGGFSKESILPKRNSDKLIARKKDWDPKKYGGFVSPTVAYSVLVVAKVEKGKSKKLKSVKELLGITIMERSSFEKNPIDFLEAKGYKEVKKDLIIKLPKYSLFELENGRKRMLASARELQKGNELALPSKYVNFLYLASHYEKLKGSPEDNEQKQLFVEQHKHYLDEIIEQISEFSKRVILADANLDKVLSAYNKHRDKPIREQAENIIHLFTLTNLGAPAAFKYFDTTIDRKQYRSTKEVLDATLIHQSITGLYETRIDLSQLGGDEGADKRTADGSEFESPKKKRKV

SEQ ID NO: 1442 - protein, 1588 aa, synthetic construct
MSEVEFSHEYWMRHALTLAKRARDEREVPVGAVLVLNNRVIGEGWNRAIGLHDPTAHAEIMALRQGGLVMQNYRLIDATLYVTFEPCVMCAGAMIHSRIGRVVFGVRNAKTGAAGSLMDVLHYPGMNHRVEITEGILADECAALLCYFFRMPRRVFNAQKKAQSSTDSGGSSGGSSGSETPGTSESATPESSGGSSGGSDKKYSIGLAIGTNSVGWAVITDEYKVPSKKFKVLGNTDRHSIKKNLIGALLFDSGETAEATRLKRTARRRYTRRKNRICYLQEIFSNEMAKVDDSFFHRLEESFLVEEDKKHERHPIFGNIVDEVAYHEKYPTIYHLRKKLVDSTDKADLRLIYLALAHMIKFRGHFLIEGDLNPDNSDVDKLFIQLVQTYNQLFEENPINASGVDAKAILSARLSKSRRLENLIAQLPGEKKNGLFGNLIALSLGLTPNFKSNFDLAEDAKLQLSKDTYDDDLDNLLAQIGDQYADLFLAAKNLSDAILLSDILRVNTEITKAPLSASMIKRYDEHHQDLTLLKALVRQQLPEKYKEIFFDQSKNGYAGYIDGGASQEEFYKFIKPILEKMDGTEELLVKLNREDLLRKQRTFDNGSIPHQIHLGELHAILRRQEDFYPFLKDNREKIEKILTFRIPYYVGPLARGNSRFAWMTRKSEETITPWNFEEVVDKGASAQSFIERMTNFDKNLPNEKVLPKHSLLYEYFTVYNELTKVKYVTEGMRKPAFLSGEQKKAIVDLLFKTNRKVTVKQLKEDYFKKIECFDSVEISGVEDRFNASLGTYHDLLKIIKDKDFLDNEENEDILEDIVLTLTLFEDREMIEERLKTYAHLFDDKVMKQLKRRRYTGWGRLSRKLINGIRDKQSGKTILDFLKSDGFANRNFMQLIHDDSLTFKEDIQKAQVSGQGDSLHEHIANLAGSPAIKKGILQTVKVVDELVKVMGRHKPENIVIEMARENQTTQKGQKNSRERMKRIEEGIKELGSQILKEHPVENTQLQNEKLYLYYLQNGRDMYVDQELDINRLSDYDVDHIVPQSFLKDDSIDNKVLTRSDKNRGKSDNVPSEEVVKKMKNYWRQLLNAKLITQRKFDNLTKAERGGLSELDKAGFIKRQLVETRQITKHVAQILDSRMNTKYDENDKLIREVKVITLKSKLVSDFRKDFQFYKVREINNYHHAHDAYLNAVVGTALIKKYPKLESEFVYGDYKVYDVRKMIAKSEQEIGKATAKYFFYSNIMNFFKTEITLANGEIRKRPLIETNGETGEIVWDKGRDFATVRKVLSMPQVNIVKKTEVQTGGFSKESILPKRNSDKLIARKKDWDPKKYGGFVSPTVAYSVLVVAKVEKGKSKKLKSVKELLGITIMERSSFEKNPIDFLEAKGYKEVKKDLIIKLPKYSLFELENGRKRMLASARELQKGNELALPSKYVNFLYLASHYEKLKGSPEDNEQKQLFVEQHKHYLDEIIEQISEFSKRVILADANLDKVLSAYNKHRDKPIREQAENIIHLFTLTNLGAPAAFKYFDTTIDRKQYRSTKEVLDATLIHQSITGLYETRIDLSQLGGDEGADKRTADGSEFESPKKKRKV

SEQ ID NO: 1443 - protein, 1588 aa, synthetic construct
MSEVEFSHEYWMRHALTLAKRARDEREVPVGAVLVLNNRVIGEGWNRAIGLHDPTAHAEIMALRQGGLVMQNYRLIDATLYVTFEPCVMCAGAMIHSRIGRVVFGVRNAKTGAAGSLMDVLHHPGMNHRVEITEGILADECAALLCRFFRMPRRVFNAQKKAQSSTDSGGSSGGSSGSETPGTSESATPESSGGSSGGSDKKYSIGLAIGTNSVGWAVITDEYKVPSKKFKVLGNTDRHSIKKNLIGALLFDSGETAEATRLKRTARRRYTRRKNRICYLQEIFSNEMAKVDDSFFHRLEESFLVEEDKKHERHPIFGNIVDEVAYHEKYPTIYHLRKKLVDSTDKADLRLIYLALAHMIKFRGHFLIEGDLNPDNSDVDKLFIQLVQTYNQLFEENPINASGVDAKAILSARLSKSRRLENLIAQLPGEKKNGLFGNLIALSLGLTPNFKSNFDLAEDAKLQLSKDTYDDDLDNLLAQIGDQYADLFLAAKNLSDAILLSDILRVNTEITKAPLSASMIKRYDEHHQDLTLLKALVRQQLPEKYKEIFFDQSKNGYAGYIDGGASQEEFYKFIKPILEKMDGTEELLVKLNREDLLRKQRTFDNGSIPHQIHLGELHAILRRQEDFYPFLKDNREKIEKILTFRIPYYVGPLARGNSRFAWMTRKSEETITPWNFEEVVDKGASAQSFIERMTNFDKNLPNEKVLPKHSLLYEYFTVYNELTKVKYVTEGMRKPAFLSGEQKKAIVDLLFKTNRKVTVKQLKEDYFKKIECFDSVEISGVEDRFNASLGTYHDLLKIIKDKDFLDNEENEDILEDIVLTLTLFEDREMIEERLKTYAHLFDDKVMKQLKRRRYTGWGRLSRKLINGIRDKQSGKTILDFLKSDGFANRNFMQLIHDDSLTFKEDIQKAQVSGQGDSLHEHIANLAGSPAIKKGILQTVKVVDELVKVMGRHKPENIVIEMARENQTTQKGQKNSRERMKRIEEGIKELGSQILKEHPVENTQLQNEKLYLYYLQNGRDMYVDQELDINRLSDYDVDHIVPQSFLKDDSIDNKVLTRSDKNRGKSDNVPSEEVVKKMKNYWRQLLNAKLITQRKFDNLTKAERGGLSELDKAGFIKRQLVETRQITKHVAQILDSRMNTKYDENDKLIREVKVITLKSKLVSDFRKDFQFYKVREINNYHHAHDAYLNAVVGTALIKKYPKLESEFVYGDYKVYDVRKMIAKSEQEIGKATAKYFFYSNIMNFFKTEITLANGEIRKRPLIETNGETGEIVWDKGRDFATVRKVLSMPQVNIVKKTEVQTGGFSKESILPKRNSDKLIARKKDWDPKKYGGFVSPTVAYSVLVVAKVEKGKSKKLKSVKELLGITIMERSSFEKNPIDFLEAKGYKEVKKDLIIKLPKYSLFELENGRKRMLASARELQKGNELALPSKYVNFLYLASHYEKLKGSPEDNEQKQLFVEQHKHYLDEIIEQISEFSKRVILADANLDKVLSAYNKHRDKPIREQAENIIHLFTLTNLGAPAAFKYFDTTIDRKQYRSTKEVLDATLIHQSITGLYETRIDLSQLGGDEGADKRTADGSEFESPKKKRKV

SEQ ID NO: 1444 - protein, 1588 aa, synthetic construct
MSEVEFSHEYWMRHALTLAKRARDEREVPVGAVLVLNNRVIGEGWNRAIGLHDPTAHAEIMALRQGGLVMQNYRLYDATLYVTFEPCVMCAGAMIHSRIGRVVFGVRNAKTGAAGSLMDVLHYPGMNHRVEITEGILADECAALLCRFFRMPRRVFNAQKKAQSSTDSGGSSGGSSGSETPGTSESATPESSGGSSGGSDKKYSIGLAIGTNSVGWAVITDEYKVPSKKFKVLGNTDRHSIKKNLIGALLFDSGETAEATRLKRTARRRYTRRKNRICYLQEIFSNEMAKVDDSFFHRLEESFLVEEDKKHERHPIFGNIVDEVAYHEKYPTIYHLRKKLVDSTDKADLRLIYLALAHMIKFRGHFLIEGDLNPDNSDVDKLFIQLVQTYNQLFEENPINASGVDAKAILSARLSKSRRLENLIAQLPGEKKNGLFGNLIALSLGLTPNFKSNFDLAEDAKLQLSKDTYDDDLDNLLAQIGDQYADLFLAAKNLSDAILLSDILRVNTEITKAPLSASMIKRYDEHHQDLTLLKALVRQQLPEKYKEIFFDQSKNGYAGYIDGGASQEEFYKFIKPILEKMDGTEELLVKLNREDLLRKQRTFDNGSIPHQIHLGELHAILRRQEDFYPFLKDNREKIEKILTFRIPYYVGPLARGNSRFAWMTRKSEETITPWNFEEVVDKGASAQSFIERMTNFDKNLPNEKVLPKHSLLYEYFTVYNELTKVKYVTEGMRKPAFLSGEQKKAIVDLLFKTNRKVTVKQLKEDYFKKIECFDSVEISGVEDRFNASLGTYHDLLKIIKDKDFLDNEENEDILEDIVLTLTLFEDREMIEERLKTYAHLFDDKVMKQLKRRRYTGWGRLSRKLINGIRDKQSGKTILDFLKSDGFANRNFMQLIHDDSLTFKEDIQKAQVSGQGDSLHEHIANLAGSPAIKKGILQTVKVVDELVKVMGRHKPENIVIEMARENQTTQKGQKNSRERMKRIEEGIKELGSQILKEHPVENTQLQNEKLYLYYLQNGRDMYVDQELDINRLSDYDVDHIVPQSFLKDDSIDNKVLTRSDKNRGKSDNVPSEEVVKKMKNYWRQLLNAKLITQRKFDNLTKAERGGLSELDKAGFIKRQLVETRQITKHVAQILDSRMNTKYDENDKLIREVKVITLKSKLVSDFRKDFQFYKVREINNYHHAHDAYLNAVVGTALIKKYPKLESEFVYGDYKVYDVRKMIAKSEQEIGKATAKYFFYSNIMNFFKTEITLANGEIRKRPLIETNGETGEIVWDKGRDFATVRKVLSMPQVNIVKKTEVQTGGFSKESILPKRNSDKLIARKKDWDPKKYGGFVSPTVAYSVLVVAKVEKGKSKKLKSVKELLGITIMERSSFEKNPIDFLEAKGYKEVKKDLIIKLPKYSLFELENGRKRMLASARELQKGNELALPSKYVNFLYLASHYEKLKGSPEDNEQKQLFVEQHKHYLDEIIEQISEFSKRVILADANLDKVLSAYNKHRDKPIREQAENIIHLFTLTNLGAPAAFKYFDTTIDRKQYRSTKEVLDATLIHQSITGLYETRIDLSQLGGDEGADKRTADGSEFESPKKKRKV

SEQ ID NO: 1445 - protein, 1588 aa, synthetic construct
MSEVEFSHEYWMRHALTLAKRARDEREVPVGAVLVLNNRVIGEGWNRAIGLHDPTAHAEIMALRQGGLVMQNYRLIDATLYVTFEPCVMCAGAMIHSRIGRVVFGVRNAKTGAAGSLMDVLHYPGMNHRVEITEGILADECAALLCRFFRMPRRVFNAQKKAQSSRDSGGSSGGSSGSETPGTSESATPESSGGSSGGSDKKYSIGLAIGTNSVGWAVITDEYKVPSKKFKVLGNTDRHSIKKNLIGALLFDSGETAEATRLKRTARRRYTRRKNRICYLQEIFSNEMAKVDDSFFHRLEESFLVEEDKKHERHPIFGNIVDEVAYHEKYPTIYHLRKKLVDSTDKADLRLIYLALAHMIKFRGHFLIEGDLNPDNSDVDKLFIQLVQTYNQLFEENPINASGVDAKAILSARLSKSRRLENLIAQLPGEKKNGLFGNLIALSLGLTPNFKSNFDLAEDAKLQLSKDTYDDDLDNLLAQIGDQYADLFLAAKNLSDAILLSDILRVNTEITKAPLSASMIKRYDEHHQDLTLLKALVRQQLPEKYKEIFFDQSKNGYAGYIDGGASQEEFYKFIKPILEKMDGTEELLVKLNREDLLRKQRTFDNGSIPHQIHLGELHAILRRQEDFYPFLKDNREKIEKILTFRIPYYVGPLARGNSRFAWMTRKSEETITPWNFEEVVDKGASAQSFIERMTNFDKNLPNEKVLPKHSLLYEYFTVYNELTKVKYVTEGMRKPAFLSGEQKKAIVDLLFKTNRKVTVKQLKEDYFKKIECFDSVEISGVEDRFNASLGTYHDLLKIIKDKDFLDNEENEDILEDIVLTLTLFEDREMIEERLKTYAHLFDDKVMKQLKRRRYTGWGRLSRKLINGIRDKQSGKTILDFLKSDGFANRNFMQLIHDDSLTFKEDIQKAQVSGQGDSLHEHIANLAGSPAIKKGILQTVKVVDELVKVMGRHKPENIVIEMARENQTTQKGQKNSRERMKRIEEGIKELGSQILKEHPVENTQLQNEKLYLYYLQNGRDMYVDQELDINRLSDYDVDHIVPQSFLKDDSIDNKVLTRSDKNRGKSDNVPSEEVVKKMKNYWRQLLNAKLITQRKFDNLTKAERGGLSELDKAGFIKRQLVETRQITKHVAQILDSRMNTKYDENDKLIREVKVITLKSKLVSDFRKDFQFYKVREINNYHHAHDAYLNAVVGTALIKKYPKLESEFVYGDYKVYDVRKMIAKSEQEIGKATAKYFFYSNIMNFFKTEITLANGEIRKRPLIETNGETGEIVWDKGRDFATVRKVLSMPQVNIVKKTEVQTGGFSKESILPKRNSDKLIARKKDWDPKKYGGFVSPTVAYSVLVVAKVEKGKSKKLKSVKELLGITIMERSSFEKNPIDFLEAKGYKEVKKDLIIKLPKYSLFELENGRKRMLASARELQKGNELALPSKYVNFLYLASHYEKLKGSPEDNEQKQLFVEQHKHYLDEIIEQISEFSKRVILADANLDKVLSAYNKHRDKPIREQAENIIHLFTLTNLGAPAAFKYFDTTIDRKQYRSTKEVLDATLIHQSITGLYETRIDLSQLGGDEGADKRTADGSEFESPKKKRKV

SEQ ID NO: 1446 - protein, 1588 aa, synthetic construct
MSEVEFSHEYWMRHALTLAKRARDEREVPVGAVLVLNNRVIGEGWNRAIGLHDPTAHAEIMALRQGGLVMQNYRLIDATLYVTFEPCVMCAGAMIHSRIGRVVFGVRNAKTGAAGSLMDVLHYPGMNHRVEITEGILADECAALLCTFFRMPRRVFNAQKKAQSSTDSGGSSGGSSGSETPGTSESATPESSGGSSGGSDKKYSIGLAIGTNSVGWAVITDEYKVPSKKFKVLGNTDRHSIKKNLIGALLFDSGETAEATRLKRTARRRYTRRKNRICYLQEIFSNEMAKVDDSFFHRLEESFLVEEDKKHERHPIFGNIVDEVAYHEKYPTIYHLRKKLVDSTDKADLRLIYLALAHMIKFRGHFLIEGDLNPDNSDVDKLFIQLVQTYNQLFEENPINASGVDAKAILSARLSKSRRLENLIAQLPGEKKNGLFGNLIALSLGLTPNFKSNFDLAEDAKLQLSKDTYDDDLDNLLAQIGDQYADLFLAAKNLSDAILLSDILRVNTEITKAPLSASMIKRYDEHHQDLTLLKALVRQQLPEKYKEIFFDQSKNGYAGYIDGGASQEEFYKFIKPILEKMDGTEELLVKLNREDLLRKQRTFDNGSIPHQIHLGELHAILRRQEDFYPFLKDNREKIEKILTFRIPYYVGPLARGNSRFAWMTRKSEETITPWNFEEVVDKGASAQSFIERMTNFDKNLPNEKVLPKHSLLYEYFTVYNELTKVKYVTEGMRKPAFLSGEQKKAIVDLLFKTNRKVTVKQLKEDYFKKIECFDSVEISGVEDRFNASLGTYHDLLKIIKDKDFLDNEENEDILEDIVLTLTLFEDREMIEERLKTYAHLFDDKVMKQLKRRRYTGWGRLSRKLINGIRDKQSGKTILDFLKSDGFANRNFMQLIHDDSLTFKEDIQKAQVSGQGDSLHEHIANLAGSPAIKKGILQTVKVVDELVKVMGRHKPENIVIEMARENQTTQKGQKNSRERMKRIEEGIKELGSQILKEHPVENTQLQNEKLYLYYLQNGRDMYVDQELDINRLSDYDVDHIVPQSFLKDDSIDNKVLTRSDKNRGKSDNVPSEEVVKKMKNYWRQLLNAKLITQRKFDNLTKAERGGLSELDKAGFIKRQLVETRQITKHVAQILDSRMNTKYDENDKLIREVKVITLKSKLVSDFRKDFQFYKVREINNYHHAHDAYLNAVVGTALIKKYPKLESEFVYGDYKVYDVRKMIAKSEQEIGKATAKYFFYSNIMNFFKTEITLANGEIRKRPLIETNGETGEIVWDKGRDFATVRKVLSMPQVNIVKKTEVQTGGFSKESILPKRNSDKLIARKKDWDPKKYGGFVSPTVAYSVLVVAKVEKGKSKKLKSVKELLGITIMERSSFEKNPIDFLEAKGYKEVKKDLIIKLPKYSLFELENGRKRMLASARELQKGNELALPSKYVNFLYLASHYEKLKGSPEDNEQKQLFVEQHKHYLDEIIEQISEFSKRVILADANLDKVLSAYNKHRDKPIREQAENIIHLFTLTNLGAPAAFKYFDTTIDRKQYRSTKEVLDATLIHQSITGLYETRIDLSQLGGDEGADKRTADGSEFESPKKKRKV

SEQ ID NO: 1447 - protein, 1588 aa, synthetic construct
MSEVEFSHEYWMRHALTLAKRARDEREVPVGAVLVLNNRVIGEGWNRAIGLHDPTAHAEIMALRQGGLVMQNYRLIDATLYVTFEPCVMCAGAMIHSRIGRVVFGVRNAKTGAAGSLMDVLHYPGMNHRVEITEGILADECAALLCTFFRMPRSVFNAQKKAQSSTDSGGSSGGSSGSETPGTSESATPESSGGSSGGSDKKYSIGLAIGTNSVGWAVITDEYKVPSKKFKVLGNTDRHSIKKNLIGALLFDSGETAEATRLKRTARRRYTRRKNRICYLQEIFSNEMAKVDDSFFHRLEESFLVEEDKKHERHPIFGNIVDEVAYHEKYPTIYHLRKKLVDSTDKADLRLIYLALAHMIKFRGHFLIEGDLNPDNSDVDKLFIQLVQTYNQLFEENPINASGVDAKAILSARLSKSRRLENLIAQLPGEKKNGLFGNLIALSLGLTPNFKSNFDLAEDAKLQLSKDTYDDDLDNLLAQIGDQYADLFLAAKNLSDAILLSDILRVNTEITKAPLSASMIKRYDEHHQDLTLLKALVRQQLPEKYKEIFFDQSKNGYAGYIDGGASQEEFYKFIKPILEKMDGTEELLVKLNREDLLRKQRTFDNGSIPHQIHLGELHAILRRQEDFYPFLKDNREKIEKILTFRIPYYVGPLARGNSRFAWMTRKSEETITPWNFEEVVDKGASAQSFIERMTNFDKNLPNEKVLPKHSLLYEYFTVYNELTKVKYVTEGMRKPAFLSGEQKKAIVDLLFKTNRKVTVKQLKEDYFKKIECFDSVEISGVEDRFNASLGTYHDLLKIIKDKDFLDNEENEDILEDIVLTLTLFEDREMIEERLKTYAHLFDDKVMKQLKRRRYTGWGRLSRKLINGIRDKQSGKTILDFLKSDGFANRNFMQLIHDDSLTFKEDIQKAQVSGQGDSLHEHIANLAGSPAIKKGILQTVKVVDELVKVMGRHKPENIVIEMARENQTTQKGQKNSRERMKRIEEGIKELGSQILKEHPVENTQLQNEKLYLYYLQNGRDMYVDQELDINRLSDYDVDHIVPQSFLKDDSIDNKVLTRSDKNRGKSDNVPSEEVVKKMKNYWRQLLNAKLITQRKFDNLTKAERGGLSELDKAGFIKRQLVETRQITKHVAQILDSRMNTKYDENDKLIREVKVITLKSKLVSDFRKDFQFYKVREINNYHHAHDAYLNAVVGTALIKKYPKLESEFVYGDYKVYDVRKMIAKSEQEIGKATAKYFFYSNIMNFFKTEITLANGEIRKRPLIETNGETGEIVWDKGRDFATVRKVLSMPQVNIVKKTEVQTGGFSKESILPKRNSDKLIARKKDWDPKKYGGFVSPTVAYSVLVVAKVEKGKSKKLKSVKELLGITIMERSSFEKNPIDFLEAKGYKEVKKDLIIKLPKYSLFELENGRKRMLASARELQKGNELALPSKYVNFLYLASHYEKLKGSPEDNEQKQLFVEQHKHYLDEIIEQISEFSKRVILADANLDKVLSAYNKHRDKPIREQAENIIHLFTLTNLGAPAAFKYFDTTIDRKQYRSTKEVLDATLIHQSITGLYETRIDLSQLGGDEGADKRTADGSEFESPKKKRKV

SEQ ID NO: 1448 - protein, 1588 aa, synthetic construct
MSEVEFSHEYWMRHALTLAKRARDEREVPVGAVLVLNNRVIGEGWNRAIGLHDPTAHAEIMALRQGGLVMQNYRLYDATLYVTFEPCVMCAGAMIHSRIGRVVFGVRNAKTGAAGSLMDVLHHPGMNHRVEITEGILADECAALLCRFFRMPRRVFNAQKKAQSSTDSGGSSGGSSGSETPGTSESATPESSGGSSGGSDKKYSIGLAIGTNSVGWAVITDEYKVPSKKFKVLGNTDRHSIKKNLIGALLFDSGETAEATRLKRTARRRYTRRKNRICYLQEIFSNEMAKVDDSFFHRLEESFLVEEDKKHERHPIFGNIVDEVAYHEKYPTIYHLRKKLVDSTDKADLRLIYLALAHMIKFRGHFLIEGDLNPDNSDVDKLFIQLVQTYNQLFEENPINASGVDAKAILSARLSKSRRLENLIAQLPGEKKNGLFGNLIALSLGLTPNFKSNFDLAEDAKLQLSKDTYDDDLDNLLAQIGDQYADLFLAAKNLSDAILLSDILRVNTEITKAPLSASMIKRYDEHHQDLTLLKALVRQQLPEKYKEIFFDQSKNGYAGYIDGGASQEEFYKFIKPILEKMDGTEELLVKLNREDLLRKQRTFDNGSIPHQIHLGELHAILRRQEDFYPFLKDNREKIEKILTFRIPYYVGPLARGNSRFAWMTRKSEETITPWNFEEVVDKGASAQSFIERMTNFDKNLPNEKVLPKHSLLYEYFTVYNELTKVKYVTEGMRKPAFLSGEQKKAIVDLLFKTNRKVTVKQLKEDYFKKIECFDSVEISGVEDRFNASLGTYHDLLKIIKDKDFLDNEENEDILEDIVLTLTLFEDREMIEERLKTYAHLFDDKVMKQLKRRRYTGWGRLSRKLINGIRDKQSGKTILDFLKSDGFANRNFMQLIHDDSLTFKEDIQKAQVSGQGDSLHEHIANLAGSPAIKKGILQTVKVVDELVKVMGRHKPENIVIEMARENQTTQKGQKNSRERMKRIEEGIKELGSQILKEHPVENTQLQNEKLYLYYLQNGRDMYVDQELDINRLSDYDVDHIVPQSFLKDDSIDNKVLTRSDKNRGKSDNVPSEEVVKKMKNYWRQLLNAKLITQRKFDNLTKAERGGLSELDKAGFIKRQLVETRQITKHVAQILDSRMNTKYDENDKLIREVKVITLKSKLVSDFRKDFQFYKVREINNYHHAHDAYLNAVVGTALIKKYPKLESEFVYGDYKVYDVRKMIAKSEQEIGKATAKYFFYSNIMNFFKTEITLANGEIRKRPLIETNGETGEIVWDKGRDFATVRKVLSMPQVNIVKKTEVQTGGFSKESILPKRNSDKLIARKKDWDPKKYGGFVSPTVAYSVLVVAKVEKGKSKKLKSVKELLGITIMERSSFEKNPIDFLEAKGYKEVKKDLIIKLPKYSLFELENGRKRMLASARELQKGNELALPSKYVNFLYLASHYEKLKGSPEDNEQKQLFVEQHKHYLDEIIEQISEFSKRVILADANLDKVLSAYNKHRDKPIREQAENIIHLFTLTNLGAPAAFKYFDTTIDRKQYRSTKEVLDATLIHQSITGLYETRIDLSQLGGDEGADKRTADGSEFESPKKKRKV

SEQ ID NO: 1449 - protein, 1588 aa, synthetic construct
MSEVEFSHEYWMRHALTLAKRARDEREVPVGAVLVLNNRVIGEGWNRAIGLHDPTAHAEIMALRQGGLVMQNYRLIDATLYSTFEPCVMCAGAMIHSRIGRVVFGVRNAKTGAAGSLMDVLHYPGMNHRVEITEGILADECAALLCYFFRMPRRVFNAQKKAQSSTDSGGSSGGSSGSETPGTSESATPESSGGSSGGSDKKYSIGLAIGTNSVGWAVITDEYKVPSKKFKVLGNTDRHSIKKNLIGALLFDSGETAEATRLKRTARRRYTRRKNRICYLQEIFSNEMAKVDDSFFHRLEESFLVEEDKKHERHPIFGNIVDEVAYHEKYPTIYHLRKKLVDSTDKADLRLIYLALAHMIKFRGHFLIEGDLNPDNSDVDKLFIQLVQTYNQLFEENPINASGVDAKAILSARLSKSRRLENLIAQLPGEKKNGLFGNLIALSLGLTPNFKSNFDLAEDAKLQLSKDTYDDDLDNLLAQIGDQYADLFLAAKNLSDAILLSDILRVNTEITKAPLSASMIKRYDEHHQDLTLLKALVRQQLPEKYKEIFFDQSKNGYAGYIDGGASQEEFYKFIKPILEKMDGTEELLVKLNREDLLRKQRTFDNGSIPHQIHLGELHAILRRQEDFYPFLKDNREKIEKILTFRIPYYVGPLARGNSRFAWMTRKSEETITPWNFEEVVDKGASAQSFIERMTNFDKNLPNEKVLPKHSLLYEYFTVYNELTKVKYVTEGMRKPAFLSGEQKKAIVDLLFKTNRKVTVKQLKEDYFKKIECFDSVEISGVEDRFNASLGTYHDLLKIIKDKDFLDNEENEDILEDIVLTLTLFEDREMIEERLKTYAHLFDDKVMKQLKRRRYTGWGRLSRKLINGIRDKQSGKTILDFLKSDGFANRNFMQLIHDDSLTFKEDIQKAQVSGQGDSLHEHIANLAGSPAIKKGILQTVKVVDELVKVMGRHKPENIVIEMARENQTTQKGQKNSRERMKRIEEGIKELGSQILKEHPVENTQLQNEKLYLYYLQNGRDMYVDQELDINRLSDYDVDHIVPQSFLKDDSIDNKVLTRSDKNRGKSDNVPSEEVVKKMKNYWRQLLNAKLITQRKFDNLTKAERGGLSELDKAGFIKRQLVETRQITKHVAQILDSRMNTKYDENDKLIREVKVITLKSKLVSDFRKDFQFYKVREINNYHHAHDAYLNAVVGTALIKKYPKLESEFVYGDYKVYDVRKMIAKSEQEIGKATAKYFFYSNIMNFFKTEITLANGEIRKRPLIETNGETGEIVWDKGRDFATVRKVLSMPQVNIVKKTEVQTGGFSKESILPKRNSDKLIARKKDWDPKKYGGFVSPTVAYSVLVVAKVEKGKSKKLKSVKELLGITIMERSSFEKNPIDFLEAKGYKEVKKDLIIKLPKYSLFELENGRKRMLASARELQKGNELALPSKYVNFLYLASHYEKLKGSPEDNEQKQLFVEQHKHYLDEIIEQISEFSKRVILADANLDKVLSAYNKHRDKPIREQAENIIHLFTLTNLGAPAAFKYFDTTIDRKQYRSTKEVLDATLIHQSITGLYETRIDLSQLGGDEGADKRTADGSEFESPKKKRKV

SEQ ID NO: 1450-1999 - skipped (550 entries)

SEQ ID NO: 2000 - DNA, 1572 bp, Lyssavirus rabies
  source 1..1572: mol_type = genomic DNA
atggttcctcaggctctcctgtttgtaccccttctggtttttccattgtgttttgggaaattccctatttacacgataccagacaagcttggtccctggagtccgattgacatacatcacctcagctgcccaaacaatttggtagtggaggacgaaggatgcaccaacctgtcagggttctcctacatggaacttaaagttggatacatcttagccataaaagtgaacgggttcacttgcacaggcgttgtgacggaggctgaaacctacactaacttcgttggttatgtcacaaccacgttcaaaagaaagcatttccgcccaacaccagatgcatgtagagccgcgtacaactggaagatggccggtgaccccagatatgaagagtctctacacaatccgtaccctgactaccgctggcttcgaactgtaaaaaccaccaaggagtctctcgttatcatatctccaagtgtggcagatttggacccatatgacagatcccttcactcgagggtcttccctagcgggaagtgctcaggagtagcggtgtcttctacctactgctccactaaccacgattacaccatttggatgcccgagaatccgagactagggatgtcttgtgacatttttaccaatagtagagggaagagagcatccaaagggagtgagacttgcggctttgtagatgaaagaggcctatataagtctttaaaaggagcatgcaaactcaagttatgtggagttctaggacttagacttatggatggaacatgggtctcgatgcaaacatcaaatgaaaccaaatggtgccctcccgataagttggtgaacctgcacgactttcgctcagacgaaattgagcaccttgttgtagaggagttggtcaggaagagagaggagtgtctggatgcactagagtccatcatgacaaccaagtcagtgagtttcagacgtctcagtcatttaagaaaacttgtccctgggtttggaaaagcatataccatattcaacaagaccttgatggaagccgatgctcactacaagtcagtcagaacttggaatgagatcctcccttcaaaagggtgtttaagagttggggggaggtgtcatcctcatgtgaacggggtgtttttcaatggtataatattaggacctgacggcaatgtcttaatcccagagatgcaatcatccctcctccagcaacatatggagttgttggaatcctcggttatcccccttgtgcaccccctggcagacccgtctaccgttttcaaggacggtgacgaggctgaggattttgttgaagttcaccttcccgatgtgcacaatcaggtctcaggagttgacttgggtctcccgaactgggggaagtatgtattactgagtgcaggggccctgactgccttgatgttgataattttcctgatgacatgttgtagaagagtcaatcgatcagaacctacgcaacacaatctcagagggacagggagggaggtgtcagtcactccccaaagcgggaagatcatatcttcatgggaatcacacaagagtgggggtgagaccagactg

SEQ ID NO: 2001 - protein, 524 aa, Lyssavirus rabies
MVPQALLFVPLLVFPLCFGKFPIYTIPDKLGPWSPIDIHHLSCPNNLVVEDEGCTNLSGFSYMELKVGYILAIKVNGFTCTGVVTEAETYTNFVGYVTTTFKRKHFRPTPDACRAAYNWKMAGDPRYEESLHNPYPDYRWLRTVKTTKESLVIISPSVADLDPYDRSLHSRVFPSGKCSGVAVSSTYCSTNHDYTIWMPENPRLGMSCDIFTNSRGKRASKGSETCGFVDERGLYKSLKGACKLKLCGVLGLRLMDGTWVSMQTSNETKWCPPDKLVNLHDFRSDEIEHLVVEELVRKREECLDALESIMTTKSVSFRRLSHLRKLVPGFGKAYTIFNKTLMEADAHYKSVRTWNEILPSKGCLRVGGRCHPHVNGVFFNGIILGPDGNVLIPEMQSSLLQQHMELLESSVIPLVHPLADPSTVFKDGDEAEDFVEVHLPDVHNQVSGVDLGLPNWGKYVLLSAGALTALMLIIFLMTCCRRVNRSEPTQHNLRGTGREVSVTPQSGKIISSWESHKSGGETRL

SEQ ID NO: 2002 - DNA, 3075 bp, Sindbis virus
  source 1..3075: mol_type = genomic DNA
atgtccgcagcaccactggtcacggcaatgtgtttgctcggaaatgtgagcttcccatgcgaccgcccgcccacatgctatacccgcgaaccttccagagccctcgacatccttgaagagaacgtgaaccatgaggcctacgataccctgctcaatgccatattgcggtgcggatcgtctggcagcgtcatcgacgactttaccctgaccagcccctacttgggcacatgctcgtactgccaccatactgaaccgtgcttcagccctgttaagatcgagcaggtctgggacgaagcggacgataacaccatacgcatacagacttccgcccagtttggatacgaccatagcggagcagcaagcgcaaacaagtaccgctacatggctgccgcggcggtaaccgactacaaagaccatgacggtgattataaagatcatgacatcgattacaaggatgacgatgacaagggttccggggtgcctactatcgtgatggtggacgcctacaagcgttacaagggtggtggcggttcggtaaccaccgttgcagctggcaccatggatgacatcaagattagcacctcaggaccgtgtagaaggcttagctacaaaggatactttctcctcgcaaaatgccctccaggggacagcgtaacggttagcatagtgagtagcaactcagcaacgtcatgtacactggcccgcaagataaaaccaaaattcgtgggacgggaaaaatatgatctacctcccgttcacggtaaaaaaattccttgcacagtgtacgaccgtctgaaagaaacaactgcaggctacatcactatgcacaggccgggaccgcacgcttatacatcctacctggaagaatcatcagggaaagtttacgcaaagccgccatctgggaagaacattacgtatgagtgcaagtgcggcgactacaagaccggaaccgtttcgacccgcaccgaaatcactggttgcaccgccatcaagcagtgcgtcgcctataagagcgaccaaacgaagtgggtcttcaactcaccggacttgatcagacatgacgaccacacggcccaagggaaattgcatttgcctttcaagttgatcccgagtacctgcatggtccctgttgcccacgcgccgaatgtaatacatggctttaaacacatcagcctccaattagatacagaccacttgacattgctcaccaccaggagactaggggcaaacccggaaccaaccactgaatggatcgtcggaaagacggtcagaaacttcaccgtcgaccgagatggcctggaatacatatggggaaatcatgagccagtgagggtctatgcccaagagtcagcaccaggagaccctcacggatggccacacgaaatagtacagcattactaccatcgccatcctgtgtacaccatcttagccgtcgcatcagctaccgtggcgatgatgattggcgtaactgttgcagtgttatgtgcctgtaaagcgcgccgtgagtgcctgacgccatacgccctggccccaaacgccgtaatcccaacttcgctggcactcttgtgctgcgttaggtcggccaatgctgaaacgttcaccgagaccatgagttacttgtggtcgaacagtcagccgttcttctgggtccagttgtgcatacctttggccgctttcatcgttctaatgcgctgctgctcctgctgcctgccttttttagtggttgccggcgcctacctggcgaaggtagacgcctacgaacatgcgaccactgttccaaatgtgccacagataccgtataaggcacttgttgaaagggcagggtatgccccgctcaatttggagatcactgtcatgtcctcggaggttttgccttccaccaaccaagagtacattacctgcaaattcaccactgtggtcccctccccaaaaatcaaatgctgcggctccttggaatgtcagccggccgctcatgcagactatacctgcaaggtcttcggaggggtctacccctttatgtggggaggagcgcaatgtttttgcgacagtgagaacagccagatgagtgaggcgtacgtcgaattgtcagcagattgcgcgtctgaccacgcgcaggcgattaaggtgcacactgccgcgatgaaagtaggactgcgtatagtgtacgggaacactaccagtttcctagatgtgtacgtgaacggagtcacaccaggaacgtctaaagacttgaaagtcatagctggaccaatttcagcatcatttacgccattcgatcataaggtcgttatccatcgcggcctggtgtacaactatgacttcccggaatatggagcgatgaaaccaggagcgtttggagacattcaagctacctccttgactagcaaggatctcatcgccagcacagacattaggctactcaagccttcctcgggcaatgtgcatgtcccgtacacgcaggccgcatcaggatttgagatgtggaaaaacaactcaggccgcccattgcaggaaaccgcacctttcgggtgtaagattgcagtaaatccgctccgagcggtggactgttcatacgggaacattcccatttctattgacatcccgaacgctgcctttatcaggacatcagatgcaccactggtctcaacagtcaaatgtgaagtcagtgagtgcacttattcagcagacttcgacgggatggccaccctgcagtatgtatccgaccgcgaaggtcaatgccccgtacattcgcattcgagcacagcaactctccaagagtcgacagtacatgtcctggagaaaggagcggtgacagtacactttagcaccgcgagtccacaggcgaactttatcgtatcgctgtgtgggaagaagacaacatgcaatgcagaatgtaaaccaccagctgaccatatcgtgagcaccccgcacaaaaatgaccaagaatttcaagccgccatctcaaaaacatcatggagttggctgtttgcccttttcggcggcgcctcgtcgctattaattataggacttatgatttttgcttgcagcatgatgctgactagcacacgaagatga

SEQ ID NO: 2003 - protein, 1024 aa, Sindbis virus
MSAAPLVTAMCLLGNVSFPCDRPPTCYTREPSRALDILEENVNHEAYDTLLNAILRCGSSGSVIDDFTLTSPYLGTCSYCHHTEPCFSPVKIEQVWDEADDNTIRIQTSAQFGYDHSGAASANKYRYMAAAAVTDYKDHDGDYKDHDIDYKDDDDKGSGVPTIVMVDAYKRYKGGGGSVTTVAAGTMDDIKISTSGPCRRLSYKGYFLLAKCPPGDSVTVSIVSSNSATSCTLARKIKPKFVGREKYDLPPVHGKKIPCTVYDRLKETTAGYITMHRPGPHAYTSYLEESSGKVYAKPPSGKNITYECKCGDYKTGTVSTRTEITGCTAIKQCVAYKSDQTKWVFNSPDLIRHDDHTAQGKLHLPFKLIPSTCMVPVAHAPNVIHGFKHISLQLDTDHLTLLTTRRLGANPEPTTEWIVGKTVRNFTVDRDGLEYIWGNHEPVRVYAQESAPGDPHGWPHEIVQHYYHRHPVYTILAVASATVAMMIGVTVAVLCACKARRECLTPYALAPNAVIPTSLALLCCVRSANAETFTETMSYLWSNSQPFFWVQLCIPLAAFIVLMRCCSCCLPFLVVAGAYLAKVDAYEHATTVPNVPQIPYKALVERAGYAPLNLEITVMSSEVLPSTNQEYITCKFTTVVPSPKIKCCGSLECQPAAHADYTCKVFGGVYPFMWGGAQCFCDSENSQMSEAYVELSADCASDHAQAIKVHTAAMKVGLRIVYGNTTSFLDVYVNGVTPGTSKDLKVIAGPISASFTPFDHKVVIHRGLVYNYDFPEYGAMKPGAFGDIQATSLTSKDLIASTDIRLLKPSSGNVHVPYTQAASGFEMWKNNSGRPLQETAPFGCKIAVNPLRAVDCSYGNIPISIDIPNAAFIRTSDAPLVSTVKCEVSECTYSADFDGMATLQYVSDREGQCPVHSHSSTATLQESTVHVLEKGAVTVHFSTASPQANFIVSLCGKKTTCNAECKPPADHIVSTPHKNDQEFQAAISKTSWSWLFALFGGASSLLIIGLMIFACSMMLTSTRR

SEQ ID NO: 2004 - DNA, 2949 bp, Sindbis virus
  source 1..2949: mol_type = genomic DNA
atgtctgccgcacctctggtgacagccatgtgcctgctgggcaacgtgagcttcccttgcaatcggccacccacatgttataccagggagccatccagagccctggatatcctggaggagaacgtgaatcacgaggcctacgacaccctgctgaacgcaatcctgagatgcggctctagcggccggagcaagaggagcgtgacagacgatttcaccctgacatctccctacctgggcacctgcagctattgtcaccacacagagccttgtttttccccaatcaagatcgagcaagtgtgggacgaggccgacgataacaccatcagaatccagaccagcgcccagttcggatacgatcagagcggagcagcatcctctaataagtacagatatatgagcctggagcaggaccacaccgtgaaggagggcacaatggacgatatcaagatctccacctctggaccttgccggcgcctgtcctacaagggatattttctgctggccaagtgtcctccaggcgactctgtgacagtgagcatcgccagctccaactctgccacaagctgcaccatggccaggaagatcaagcctaagttcgtgggcagagagaagtacgacctgccccctgtgcacggcaagaagatcccatgtaccgtgtatgatcggctgaaggagaccacagcaggatacatcaccatgcacaggccaggacctcacgcatacacatcttatctggaggagtctagcggcaaggtgtatgccaagccacccagcggcaagaacatcacctacgagtgcaagtgtggcgattataagaccggcacagtgaccacaaggacagagatcaccggctgcacagccatcaagcagtgcgtggcctacaagagcgaccagaccaagtgggtgttcaattccccagacctgatcagacacgccgatcacaccgcacagggcaagctgcacctgccctttaagctgatcccttccacatgcatggtgccagtggcacacgcaccaaacgtggtgcacggcttcaagcacatctctctgcagctggacaccgatcacctgacactgctgaccacaaggagactgggcgccaatccagagcccaccacagagtggatcatcggcaagaccgtgcggaacttcacagtggaccgcgatggcctggagtatatctggggcaatcacgagcctgtgcgggtgtacgcacaggagtccgccccaggcgatccccacggatggccacacgagatcgtgcagcactactatcaccgccaccccgtgtacaccatcctggcagtggcaagcgccgcagtggcaatgatgatcggagtgacagtggccgccctgtgcgcctgtaaggcaaggagggagtgcctgaccccttatgccctggccccaaacgccgtgatccccacatctctggccctgctgtgctgcgtgaggagcgccaacgccgagacctttacagagaccatgtcttacctgtggagcaattcccagccattcttttgggtgcagctgtgcatcccactggcagccgtgatcgtgctgatgcgctgctgtagctgctgtctgcccttcctggtggtggcaggagcatacctggcaaaggtggacgcctatgagcacgccaccacagtgcctaatgtgccacagatcccatataaggccctggtggagagggcaggatacgcaccactgaacctggagatcaccgtgatgtcctctgaggtgctgccctccaccaatcaggagtatatcacatgcaagtttaccacagtggtgccttccccaaaggtgaagtgctgtggctctctggagtgccagccagcagcacacgcagattatacctgtaaggtgttcggcggcgtgtacccctttatgtggggaggagcacagtgcttctgtgactccgagaactctcagatgagcgaggcctacgtggagctgagcgccgactgtgcaaccgatcacgcacaggccatcaaggtgcacacagccgccatgaaagtgggcctgagaatcgtgtatggcaacaccaccagcttcctggacgtgtacgtgaatggcgtgacccctggcacatctaaggacctgaaagtgatcgccggcccaatctctgccagcttcaccccctttgatcacaaggtggtcatccacaggggcctggtgtacaattatgacttccctgagtacggcgccatgaagccaggcgcctttggcgatatccaggccacctccctgacatctaaggacctgatcgcctccaccgatatcagactgctgaagccctctgccaagaacgtgcacgtgccttatacacaggccgccagcggcttcgagatgtggaagaacaattccggccggcctctgcaggagaccgcaccatttggctgcaagatcgcagtgaatccactgagggcagtggactgttcctacggaaacatccccatctctatcgatatccctaatgccgcctttatcaggacctccgacgcccctctggtgtctacagtgaagtgcgacgtgtccgaatgtacctattctgccgatttcggcggcatggccacactgcagtacgtgtccgacagagagggccagtgccccgtgcactctcacagctccacagccaccctgcaggagagcactgtgcacgtgctggagaagggagcagtgaccgtgcacttcagcacagcctccccacaggccaacttcatcgtgagcctgtgcggcaagaagaccacatgcaatgccgagtgtaagcctccagccgaccacatcgtgagcaccccccacaagaacgatcaggagtttcaggccgccatctccaagacatcctggtcttggctgttcgccctgtttggcggcgcctctagcctgctgatcatcggcctgatgatcttcgcctgcagcatgatgctgacatccaccaggagatga

SEQ ID NO: 2005 - protein, 982 aa, Sindbis virus
MSAAPLVTAMCLLGNVSFPCNRPPTCYTREPSRALDILEENVNHEAYDTLLNAILRCGSSGRSKRSVTDDFTLTSPYLGTCSYCHHTEPCFSPIKIEQVWDEADDNTIRIQTSAQFGYDQSGAASSNKYRYMSLEQDHTVKEGTMDDIKISTSGPCRRLSYKGYFLLAKCPPGDSVTVSIASSNSATSCTMARKIKPKFVGREKYDLPPVHGKKIPCTVYDRLKETTAGYITMHRPGPHAYTSYLEESSGKVYAKPPSGKNITYECKCGDYKTGTVTTRTEITGCTAIKQCVAYKSDQTKWVFNSPDLIRHADHTAQGKLHLPFKLIPSTCMVPVAHAPNVVHGFKHISLQLDTDHLTLLTTRRLGANPEPTTEWIIGKTVRNFTVDRDGLEYIWGNHEPVRVYAQESAPGDPHGWPHEIVQHYYHRHPVYTILAVASAAVAMMIGVTVAALCACKARRECLTPYALAPNAVIPTSLALLCCVRSANAETFTETMSYLWSNSQPFFWVQLCIPLAAVIVLMRCCSCCLPFLVVAGAYLAKVDAYEHATTVPNVPQIPYKALVERAGYAPLNLEITVMSSEVLPSTNQEYITCKFTTVVPSPKVKCCGSLECQPAAHADYTCKVFGGVYPFMWGGAQCFCDSENSQMSEAYVELSADCATDHAQAIKVHTAAMKVGLRIVYGNTTSFLDVYVNGVTPGTSKDLKVIAGPISASFTPFDHKVVIHRGLVYNYDFPEYGAMKPGAFGDIQATSLTSKDLIASTDIRLLKPSAKNVHVPYTQAASGFEMWKNNSGRPLQETAPFGCKIAVNPLRAVDCSYGNIPISIDIPNAAFIRTSDAPLVSTVKCDVSECTYSADFGGMATLQYVSDREGQCPVHSHSSTATLQESTVHVLEKGAVTVHFSTASPQANFIVSLCGKKTTCNAECKPPADHIVSTPHKNDQEFQAAISKTSWSWLFALFGGASSLLIIGLMIFACSMMLTSTRR

SEQ ID NO: 2006 - DNA, 2964 bp, Semliki Forest virus
  source 1..2964: mol_type = genomic DNA
atgtccgccccgctgattactgccatgtgtgtccttgccaatgctaccttcccgtgcttccagcccccgtgtgtaccttgctgctatgaaaacaacgcagaggccacactacggatgctcgaggataacgtggataggccagggtactacgacctccttcaggcagccttgacgtgccgaaacggaacaagacaccggcgcagcgtgtcgcaacacttcaacgtgtataaggctacacgcccttacatcgcgtactgcgccgactgcggagcagggcactcgtgtcatagccccgtagcaattgaagcgatcaggtccgaagctaccgacgggatgctgaagattcagttctcggcacaaattggcatagataagagtgacaatcatgactacacgaagataaggtacgcagacgggcacgccattgagaatgccgtccggtcatctttgaaggtagccacctccggagactgtttcgtccatggcacaatgggacatttcatactggcaaagtgcccaccgggtgaattcctgcaggtctcgatccaggacaccagaaacgcggtccgtgcctgcagaatacaatatcatcatgaccctcaaccggtgggtagagaaaaatttacaattagaccacactatggaaaagagatcccttgcaccacttatcaacagaccacagcgaagaccgtggaggaaatcgacatgcatatgccgccagatacgccggacaggacgttgctatcacagcaatctggcaatgtaaagatcacagtcggaggaaagaaggtgaaatacaactgcacctgtggaaccggaaacgttggcactactaattcggacatgacgatcaacacgtgtctaatagagcagtgccacgtctcagtgacggaccataagaaatggcagttcaactcacctttcgtcccgagagccgacgaaccggctagaaaaggcaaagtccatatcccattcccgttggacaacatcacatgcagagttccaatggcgcgcgaaccaaccgtcatccacggcaaaagagaagtgacactgcaccttcacccagatcatcccacgctcttttcctaccgcacactgggtgaggacccgcagtatcacgaggaatgggtgacagcggcggtggaacggaccatacccgtaccagtggacgggatggagtaccactggggaaacaacgacccagtgaggctttggtctcaactcaccactgaagggaaaccgcacggctggccgcatcagatcgtacagtactactatgggctttacccggccgctacagtatccgcggtcgtcgggatgagcttactggcgttgatatcgatcttcgcgtcgtgctacatgctggttgcggcccgcagtaagtgcttgaccccttatgctttaacaccaggagctgcagttccgtggacgctggggatactctgctgcgccccgcgggcgcacgcagctagtgtggcagagactatggcctacttgtgggaccaaaaccaagcgttgttctggttggagtttgcggcccctgttgcctgcatcctcatcatcacgtattgcctcagaaacgtgctgtgttgctgtaagagcctttcttttttagtgctactgagcctcggggcaaccgccagagcttacgaacattcgacagtaatgccgaacgtggtggggttcccgtataaggctcacattgaaaggccaggatatagccccctcactttgcagatgcaggttgttgaaaccagcctcgaaccaacccttaatttggaatacataacctgtgagtacaagacggtcgtcccgtcgccgtacgtgaagtgctgcggcgcctcagagtgctccactaaagagaagcctgactaccaatgcaaggtttacacaggcgtgtacccgttcatgtggggaggggcatattgcttctgcgactcagaaaacacgcaactcagcgaggcgtacgtcgatcgatcggacgtatgcaggcatgatcacgcatctgcttacaaagcccatacagcatcgctgaaggccaaagtgagggttatgtacggcaacgtaaaccagactgtggatgtttacgtgaacggagaccatgccgtcacgatagggggtactcagttcatattcgggccgctgtcatcggcctggaccccgttcgacaacaagatagtcgtgtacaaagacgaagtgttcaatcaggacttcccgccgtacggatctgggcaaccagggcgcttcggcgacatccaaagcagaacagtggagagtaacgacctgtacgcgaacacggcactgaagctggcacgcccttcacccggcatggtccatgtaccgtacacacagacaccttcagggttcaaatattggctaaaggaaaaagggacagccctaaatacgaaggctccttttggctgccaaatcaaaacgaaccctgtcagggccatgaactgcgccgtgggaaacatccctgtctccatgaatttgcctgacagcgcctttacccgcattgtcgaggcgccgaccatcattgacctgacttgcacagtggctacctgtacgcactcctcggatttcggcggcgtcttgacactgacgtacaagaccgacaagaacggggactgctctgtacactcgcactctaacgtagctactctacaggaggccacagcaaaagtgaagacagcaggtaaggtgaccttacacttctccacggcaagcgcatcaccttcttttgtggtgtcgctatgcagtgctagggccacctgttcagcgtcgtgtgagcccccgaaagaccacatagtcccatatgcggccagccacagtaacgtagtgtttccagacatgtcgggcaccgcactatcatgggtgcagaaaatctcgggtggtctgggggccttcgcaatcggcgctatcctggtgctggttgtggtcacttgcattgggctccgcagataa

SEQ ID NO: 2007 - protein, 987 aa, Semliki Forest virus
MSAPLITAMCVLANATFPCFQPPCVPCCYENNAEATLRMLEDNVDRPGYYDLLQAALTCRNGTRHRRSVSQHFNVYKATRPYIAYCADCGAGHSCHSPVAIEAIRSEATDGMLKIQFSAQIGIDKSDNHDYTKIRYADGHAIENAVRSSLKVATSGDCFVHGTMGHFILAKCPPGEFLQVSIQDTRNAVRACRIQYHHDPQPVGREKFTIRPHYGKEIPCTTYQQTTAKTVEEIDMHMPPDTPDRTLLSQQSGNVKITVGGKKVKYNCTCGTGNVGTTNSDMTINTCLIEQCHVSVTDHKKWQFNSPFVPRADEPARKGKVHIPFPLDNITCRVPMAREPTVIHGKREVTLHLHPDHPTLFSYRTLGEDPQYHEEWVTAAVERTIPVPVDGMEYHWGNNDPVRLWSQLTTEGKPHGWPHQIVQYYYGLYPAATVSAVVGMSLLALISIFASCYMLVAARSKCLTPYALTPGAAVPWTLGILCCAPRAHAASVAETMAYLWDQNQALFWLEFAAPVACILIITYCLRNVLCCCKSLSFLVLLSLGATARAYEHSTVMPNVVGFPYKAHIERPGYSPLTLQMQVVETSLEPTLNLEYITCEYKTVVPSPYVKCCGASECSTKEKPDYQCKVYTGVYPFMWGGAYCFCDSENTQLSEAYVDRSDVCRHDHASAYKAHTASLKAKVRVMYGNVNQTVDVYVNGDHAVTIGGTQFIFGPLSSAWTPFDNKIVVYKDEVFNQDFPPYGSGQPGRFGDIQSRTVESNDLYANTALKLARPSPGMVHVPYTQTPSGFKYWLKEKGTALNTKAPFGCQIKTNPVRAMNCAVGNIPVSMNLPDSAFTRIVEAPTIIDLTCTVATCTHSSDFGGVLTLTYKTDKNGDCSVHSHSNVATLQEATAKVKTAGKVTLHFSTASASPSFVVSLCSARATCSASCEPPKDHIVPYAASHSNVVFPDMSGTALSWVQKISGGLGAFAIGAILVLVVVTCIGLRR

SEQ ID NO: 2008 - DNA, 2964 bp, Chikungunya virus
  source 1..2964: mol_type = genomic DNA
atgtcacttgctctgcctgttctgtgcctgctggccaacaccacctttccatgtagccagcctccatgcacaccctgctgctacgagaaagagcctgagagcaccctgcggatgctggaagataacgtgatgaggcccggctactaccagctgctgaaggcctctctgacatgcagccctcaccggcagagaagatccaccaaggacaacttcaacgtctacaaggccaccagaccttacctggctcactgccctgattgtggcgagggccactcttgtcacagccctatcgctctggaacggatcagaaacgaggccaccgatggcaccctgaagatccaggtgtccctgcagatcggaatcaagaccgacgacagccacgactggaccaagctgcggtacatggactctcacacaccagccgatgccgagcgagctggactgctcgttagaacatctgccccttgcaccatcaccggcacaatgggccacttcatcctggccagatgtcccaagggcgagacactgaccgtgggcttcaccgacagccggaagatcagccacacatgcacacaccccttccaccacgagcctccagtgatcggcagagagaggttccacagcagaccccagcacggcaaagagctgccttgtagcacatacgtgcagagcacagccgccaccgccgaagagattgaagtgcacatgcctccagacacacccgacagaaccctgatgacacagcagagcggcaacgtgaagatcaccgtgaatggccagaccgtgcggtacaagtgtaactgcggcggctctaatgagggcctgaccaccaccgacaaagtgatcaacaactgcaagatcgaccagtgccacgccgccgtgaccaaccacaagaactggcagtacaacagcccactggtgcccagaaatgccgagctgggcgatagaaagggcaagattcacatcccctttccactggccaacgtgacctgcagagtgccaaaggccagaaatcccaccgtgacctacggcaagaatcaagtgacaatgctgctgtaccccgaccatcctacactgctgagctaccggaacatgggccaagagcctaactaccacgaagagtgggtcacccacaagaaagaagtgaccctgacagtccccaccgaaggcctggaagtgacctggggaaacaacgagccctacaagtactggccccagatgagcaccaatggcacagcccacggacaccctcacgagatcatcctgtactactacgagctgtaccctaccatgaccgtggtcatcgtgtctgtggccagcttcgtgctgctgagcatggttggaacagccgtggggatgtgcgtgtgcgctagaagaagatgcatcaccccttacgagctgacacccggcgctaccgttccttttctgctgtccctgctgtgctgtgtgcggacaacaaaggccgccacctactatgaggccgctgcctacctgtggaacgagcagcaacctctgttttggctgcaagccctgattcctctggccgctctgatcgtgctgtgcaactgtctgaagctgctgccttgctgttgcaagaccctggcctttctggccgtgatgtctatcggcgcccataccgtgtctgcctacgagcacgtgacagtgatccccaataccgtgggagtgccttacaagaccctcgtgaacagacccggctattcccctatggtgctggaaatggaactgcagagcgtgaccctggaacctacactgagcctggactacatcacatgcgagtacaagaccgtgataccctctccatacgtgaagtgctgtggcaccgccgagtgcaaggataagagcctgcctgactacagctgcaaggtgttcaccggcgtgtacccctttatgtggggcggagcctactgcttctgcgacgccgagaatacccagctgtctgaggcccacgtggaaaagagcgagagctgcaagaccgagttcgccagcgcctatagagcccatacagcctctgccagcgccaagctgagagtgctgtaccagggcaacaacatcaccgtggccgcctacgccaatggcgatcatgccgtgactgtgaaggacgccaagttcgtcgtgggccctatgtctagcgcctggacacccttcgataacaagatcgtggtgtataagggcgacgtttacaacatggactaccctccattcggagccggcagacctggacagttcggagacatccagagcagaacccctgagtccaaggacgtgtacgccaacacacagctggtgctgcaaagacctgccgccggaacagtgcacgtgccctattctcaagcccctagcggcttcaagtattggctgaaagagagaggcgccagcctgcagcatacagccccttttggctgtcagatcgccaccaatcctgtgcgggccgtgaattgtgccgtgggcaatatccccatcagcatcgacatccccgacgccgcctttaccagagtggttgatgccccaagcgtgaccgacatgtcttgcgaggtgccagcttgtacccacagcagcgattttggcggagtggccatcatcaagtacaccgcctccaagaaaggcaagtgtgccgtgcacagcatgaccaacgccgtgacaatcagagaagccgacgtggaagtggaaggcaacagccagctgcagatcagcttctctacagccctggcctccgccgagttcagagtgcaagtctgtagcacccaggtgcactgtgctgccgcttgtcaccctccaaaggaccacatcgtgaactaccccgccagccacactacactgggagtgcaggatattagcaccaccgccatgagctgggtgcagaaaatcacaggtggcgtgggactgatcgtggccgtggctgctctgattctgatcgttgtgctgtgcgtgtccttcagccggcat

SEQ ID NO: 2009 - protein, 988 aa, Chikungunya virus
MSLALPVLCLLANTTFPCSQPPCTPCCYEKEPESTLRMLEDNVMRPGYYQLLKASLTCSPHRQRRSTKDNFNVYKATRPYLAHCPDCGEGHSCHSPIALERIRNEATDGTLKIQVSLQIGIKTDDSHDWTKLRYMDSHTPADAERAGLLVRTSAPCTITGTMGHFILARCPKGETLTVGFTDSRKISHTCTHPFHHEPPVIGRERFHSRPQHGKELPCSTYVQSTAATAEEIEVHMPPDTPDRTLMTQQSGNVKITVNGQTVRYKCNCGGSNEGLTTTDKVINNCKIDQCHAAVTNHKNWQYNSPLVPRNAELGDRKGKIHIPFPLANVTCRVPKARNPTVTYGKNQVTMLLYPDHPTLLSYRNMGQEPNYHEEWVTHKKEVTLTVPTEGLEVTWGNNEPYKYWPQMSTNGTAHGHPHEIILYYYELYPTMTVVIVSVASFVLLSMVGTAVGMCVCARRRCITPYELTPGATVPFLLSLLCCVRTTKAATYYEAAAYLWNEQQPLFWLQALIPLAALIVLCNCLKLLPCCCKTLAFLAVMSIGAHTVSAYEHVTVIPNTVGVPYKTLVNRPGYSPMVLEMELQSVTLEPTLSLDYITCEYKTVIPSPYVKCCGTAECKDKSLPDYSCKVFTGVYPFMWGGAYCFCDAENTQLSEAHVEKSESCKTEFASAYRAHTASASAKLRVLYQGNNITVAAYANGDHAVTVKDAKFVVGPMSSAWTPFDNKIVVYKGDVYNMDYPPFGAGRPGQFGDIQSRTPESKDVYANTQLVLQRPAAGTVHVPYSQAPSGFKYWLKERGASLQHTAPFGCQIATNPVRAVNCAVGNIPISIDIPDAAFTRVVDAPSVTDMSCEVPACTHSSDFGGVAIIKYTASKKGKCAVHSMTNAVTIREADVEVEGNSQLQISFSTALASAEFRVQVCSTQVHCAAACHPPKDHIVNYPASHTTLGVQDISTTAMSWVQKITGGVGLIVAVAALILIVVLCVSFSRH

SEQ ID NO: 2010 - DNA, 3729 bp, Mayaro virus
  source 1..3729: mol_type = genomic DNA
atggacttcctgcctacacaggtgttctacggccgaagatggcggcccagaatgcctcctagaccttggaggcctagaatgcccaccatgcagaggcctgatcagcaggccagacagatgcagcagctgattgccgccgtgtctacactggccctgagacagaatgctgccgctcctcagagaggcaagaagaagcagcccagacggaagaagcccaagcctcagcctgagaagcctaagaagcaagagcagaaacccaagcagaagatggcccctaagcggaagcctggcagacgcgagagaatgtgcatgaagatcgagcacgactgcatcttcgaagtgaagcacgagggcaaagtgaccggctacgcctgtctcgtgggcgacaaagtgatgaagcctgctcatgtgcccggcgtgatcgacaatgccgatctggctcggctgagctacaagaagtcctctaagtacgacctggaatgcgctcagatccccgtggccatgaagtccgatgccagcaagtacacccacgagaagcctgagggccactacaactggcattatggcgccgtgcagtacaccggcggcagattcacagttcctacaggcgtgggaaagcccggcgattctggcagacccatcttcgacaacaagggcagagtggtggccatcgtgcttggcggagctaatgagggcacaagaacagccctgagcgtggtcacctggaacaaggacatggtcaccaagatcacccctgagggcactgtggaatgggccgcctctacagtgacagccatgtgcctgctgaccaacatcagcttcccttgcttccagcctagctgcgccccttgctgttatgagaagggccctgagcctacactgcggatgctggaagagaacgtgaacagcgagggctactacgacctgctgcacgccgctgtgtactgccggaatagcagcagatccaagcggagcaccgccaaccacttcaacgcctacaagctgaccagaccttacgtggcctactgcgccgattgtggcatgggccactcttgtcacagccccgccatgatcgagaacatccaggccgatgccaccgacggcacactgaagatccagttcgcctctcagatcggcctgaccaagaccgacacacacgaccacacaaagatcagatacgccgagggccacgacattgccgaagccgctagaagcaccctgaaggtgcacagcagcagcgagtgtaccgtgacaggcaccatgggacacttcatcctggccaagtgtcctccaggcgaggccatctccgtgtccttcgtggacagcaagaacgagcaccggacctgcaggatcgcctatctgcacgagcagagactgatcggccgcgagagattcaccgtcagacctcaccacggaatcgagctgccttgcaccacctaccagctgacaacagccgagacaagcgaagagatcgacatgcacatgcctccagacatccccgacagaaccatcctgtctcagcagagcggcaacgtgaagatcaccgtgaacggcagaaccgtgcggtacagctgttcctgtggcagcaagcctagcggcaccaccaccacagacaagaccatcaacagctgcaccgtggacaagtgccaggcctacgtgacaagccacaccaagtggcagttcaacagccccttcgtgcctagagccgagcaggccgagagaaaaggcaaagtgcacatcccctttccgctgatcaacaccacctgtcgggttccactggctccagaggctctcgttagaagcggcaagagagaggccacactgtctctgcaccctattcaccccacactgctgtcctacagaaccctgggagccgagcctgtgttcgacgagcagtggatcactgcccagaccgaagtgacaatccccgtgcctgttgaaggcgtggaataccagtggggcaatcacaagccccagagactgtggtcccagctgaccactgagggaaaagcccacggatggccccacgagatcatcgagtactactacggactgcaccccacaaccaccatcgtggtcgtgattgctgtcagcgtggtggtcctgctgagctttgccgcctccgtgtatatgtgcgtggtggcccggaacaagtgtctgaccccttacgctcttacacccggcgctgttgtgcctgtgacaatcggagtgctgtgctgtgcccctaaagctcacgccgccagttttgccgaaggcatggcctacctgtgggacaacaaccagagcatgttctggatggaactgacaggccctctggctctcctgatcctggctacatgttgcgcaagatccctgctgtcttgctgcaagggcagcttcctggtggctatgtctatcggatctgccgtggccagcgcctacgagcacacagccatcattcccaatcaagtgggcttcccctacaaggcccacgtggccagagagggctattcccctctgacactgcaaatgcaagtgatcgaaaccagcctggaaccgacactgaaccttgagtacatcacctgtgactacaagaccaaggtgccctctccatacgtgaagtgctgtggcaccgccgagtgcagaacccaggataagcccgagtataagtgcgccgtgttcaccggcgtgtacccctttatgtggggcggagcctactgcttctgcgacagcgagaatacccagatgagcgaggcctatgtcgagagggccgatgtgtgcaagcacgaccatgccgctgcctacagagcccacacagcttctctgcgggccaagatcaaagtgacatacggcaccgtgaatcagaccgtggaagcctatgtgaacggcgaccacgccgtgaccattgccggcaccaagtttatctttggccccgtgtccaccgcctggacacccttcgatacaaagatcgtggtgtataagggcgaagtctacaaccaggacttccctccttacggcgctggacagccaggcagattcggagacatccagagcaggaccctggatagcagggacctgtatgccaacaccggcctgaaactggctagaccagccgccggaaatatccacgtgccatacacacagaccccaagcggcttcaagacctggcagaaggacagagacagccctctgaacgccaaggctcctttcggctgcatcatccagaccaatcctgtgcgggccatgaattgcgccgtgggcaatatccccgtgtctatggacattgctgacagcgccttcaccagactgacagacgcccctgtgatcagcgagctgacctgcacagtgtccacatgcacccacagcagcgactttggaggaatcgccgtgctgagctataaggtggaaaagtccggcagatgcgacatccacagccacagcaatgtggccgtgctgcaagaggtgtccatcgagacagagggcagaagcgtgatccatttctccaccgcaagcgcctctccatcctttgtggtgtccgtgtgcagcagcagagccacctgtaccgccaagtgcgagcctcctaaggatcacgtggtcacataccccgccaatcacaacggcgtgaccctgcctgatctgtcctctaccgctatgacatgggcccagcatctggctggcggagtgggactgcttattgctctggcagtgctgatcctcgtgatcgtgacctgtgtgaccctgaggcggtaa

SEQ ID NO: 2011 - protein, 1242 aa, Mayaro virus
MDFLPTQVFYGRRWRPRMPPRPWRPRMPTMQRPDQQARQMQQLIAAVSTLALRQNAAAPQRGKKKQPRRKKPKPQPEKPKKQEQKPKQKMAPKRKPGRRERMCMKIEHDCIFEVKHEGKVTGYACLVGDKVMKPAHVPGVIDNADLARLSYKKSSKYDLECAQIPVAMKSDASKYTHEKPEGHYNWHYGAVQYTGGRFTVPTGVGKPGDSGRPIFDNKGRVVAIVLGGANEGTRTALSVVTWNKDMVTKITPEGTVEWAASTVTAMCLLTNISFPCFQPSCAPCCYEKGPEPTLRMLEENVNSEGYYDLLHAAVYCRNSSRSKRSTANHFNAYKLTRPYVAYCADCGMGHSCHSPAMIENIQADATDGTLKIQFASQIGLTKTDTHDHTKIRYAEGHDIAEAARSTLKVHSSSECTVTGTMGHFILAKCPPGEAISVSFVDSKNEHRTCRIAYLHEQRLIGRERFTVRPHHGIELPCTTYQLTTAETSEEIDMHMPPDIPDRTILSQQSGNVKITVNGRTVRYSCSCGSKPSGTTTTDKTINSCTVDKCQAYVTSHTKWQFNSPFVPRAEQAERKGKVHIPFPLINTTCRVPLAPEALVRSGKREATLSLHPIHPTLLSYRTLGAEPVFDEQWITAQTEVTIPVPVEGVEYQWGNHKPQRLWSQLTTEGKAHGWPHEIIEYYYGLHPTTTIVVVIAVSVVVLLSFAASVYMCVVARNKCLTPYALTPGAVVPVTIGVLCCAPKAHAASFAEGMAYLWDNNQSMFWMELTGPLALLILATCCARSLLSCCKGSFLVAMSIGSAVASAYEHTAIIPNQVGFPYKAHVAREGYSPLTLQMQVIETSLEPTLNLEYITCDYKTKVPSPYVKCCGTAECRTQDKPEYKCAVFTGVYPFMWGGAYCFCDSENTQMSEAYVERADVCKHDHAAAYRAHTASLRAKIKVTYGTVNQTVEAYVNGDHAVTIAGTKFIFGPVSTAWTPFDTKIVVYKGEVYNQDFPPYGAGQPGRFGDIQSRTLDSRDLYANTGLKLARPAAGNIHVPYTQTPSGFKTWQKDRDSPLNAKAPFGCIIQTNPVRAMNCAVGNIPVSMDIADSAFTRLTDAPVISELTCTVSTCTHSSDFGGIAVLSYKVEKSGRCDIHSHSNVAVLQEVSIETEGRSVIHFSTASASPSFVVSVCSSRATCTAKCEPPKDHVVTYPANHNGVTLPDLSSTAMTWAQHLAGGVGLLIALAVLILVIVTCVTLRR

SEQ ID NO: 2012 - DNA, 2967 bp, Onyong-nyong virus
  source 1..2967: mol_type = genomic DNA
atgtctctggccctgcctgtgatgatgtgcctgctggccaacaccacctttccatgcagccagcctccatgcgctccctgctgttacgagaagaagcccgaagagacactgcggatgctggaagataacgtgatgcagcccggctactaccagctgctggattctgccctggcctgctctcagcggagacagaagagaaacgcccgcgagaacttcaacgtctacaaagtgacccggccttacctggctcactgccctgattgtggcgagggccactcttgtcacagccctatcgctctggaacggatcagatccgaggccaccgatggcaccctgaagattcaggtgtccctgcagatcggcatcaagaccgacgacagccacgactggacaaagctgcggtacatggacagccacacacctgtggacgccgatagaagcggactgttcgtgcggacatctgccccttgcacaatcaccggcaccatgggccacttcatcctggccagatgtcccaagggcgagacactgacagtgggcttcgtggacagcagacggatcagccacacctgtatgcaccccttcagacacgagcctccactgatcggcagagagaagttccacagcagaccccagcacggcaaagagctgccttgtagcacctacgtgcacaccacagccgccaccgccgaagagattgaagtgcacatgcctccagacacacccgactacaccctgatgacacagcaggccggcaacgtgaagatcaccgtggatggccagaccgtgcggtacaagtgcaagtgcgacggctctaacgagggcctgatcaccgccgacaaagtgatcaacaactgcaaggtggaccagtgccacaccgccgtgaccaaccacaagaagtggcagtacaacagccctctgacaccccggaatagcgagcagggcgatagaaagggcaagattcacatcccctttccgctggtcaacacaacctgcagagtgcccaaggccagaaatcccaccgtgacctacggcaagaacagagtgacactgctgctgcacccagatcaccccacactgctgagctacagagccatgggaagaatccccgactaccacgaggaatggatcaccaacaagaaagaaatcagcatcaccgtgcctgccgaaggcctggaagtgacctggggcaacaacgacccctacaagtactggccacagctgagcaccaatggcacagcccacggacaccctcacgagatcatcctgtactactacgagctgtaccccaccaccacaatcgctgttctggctgccgccagcatcgtgatcacatctctcgtgggactgagcctgggcatgtgtatctgcgctcggcggagatgcatcaccccttacgaacttacccctggcgccaccattccttttctgctgggcgtgctgtgctgtgccagaactgccaaagccgccagctattacgaggccgccacctacctgtggaacgagcagcaacctctgttttggctgcagctgctgatccctctgagcgccgctatcgtcgtgtgcaactgtctgaagctgctgccctgttgctgcaagaccctgacctttctggccgtgatgagcatcggagccagaaccgtgacagcctacgaacacgccacagtgatccccaataccgtgggagtgccctgcaagacactggtgtccagacctggctacagcccaatggtgctggaaatggaactgcagagcgtgaccctggaacctgctctgtccctggactacatcacatgcgagtacaagaccatcacaccctctccatacgtgaagtgctgtggcaccgccgagtgcaaggccaagaacctgcctgactataattgcaaggtgttcaccggcgtgtaccccttcatgtggggcggagcctactgcttctgtgacgccgagaatacccagctgtctgaggcccacgtggaaaagagcgagagctgcaaaaccgagttcgccagcgcctatagagcccacacagcctctgtgtccgccaagctgagagtgttctaccagggcaacaatatcaccgtgtccgcctacgccaatggcgaccatgctgtgacagtggaagatgccaagttcgtgatcggcccactgagcagtgcttggagccccttcgacaacaagatcgtggtgtataagggcgaagtctacaacatggactaccctccattcggagccggcagacctggacagttcggagacatccagagcagaacccctgacagcaaggacgtgtacgccaacacacagctgatcctgcagaggcctgctgccggcgctattcacgtgccatattctcaggcccctagcggcttcaagtattggctgaaagagaagggcgccagcctgcagcacacagccccttttggttgccagatcgccaccaatcctgtgcgggccgtgaattgtgccgtgggcaatatccctgtgtccatcgacatccccgacgccgccttcacaagagtgacagatgccccttccatcaccgacatgtcttgcgaggtggccagctgcacacactccagcgattttggaggcgccgctgtgatcaagtacaccgccagcaagaaaggcaagtgcgccgtgcacagcgtgacaaacgcagtgaccatccgcgagcctaacgtggacgtgaagggaacagcccagctgcagattgccttctctacagccctggccagcgccgagtttaaggtgcagatttgctctaccctggtgcactgcagcgccacatgtcaccctccaaaggaccacatcgtgaactacccctctccacacaccacactgggagtgcaggacatcagcacaaccgccatgagttgggtgcagaaaatcacaggcggcgttggcctggtggtggccattgctgctctgatcctgatcatcgtcctgtgcgtgtccttcagccggcac

SEQ ID NO: 2013 - protein, 989 aa, Onyong-nyong virus
MSLALPVMMCLLANTTFPCSQPPCAPCCYEKKPEETLRMLEDNVMQPGYYQLLDSALACSQRRQKRNARENFNVYKVTRPYLAHCPDCGEGHSCHSPIALERIRSEATDGTLKIQVSLQIGIKTDDSHDWTKLRYMDSHTPVDADRSGLFVRTSAPCTITGTMGHFILARCPKGETLTVGFVDSRRISHTCMHPFRHEPPLIGREKFHSRPQHGKELPCSTYVHTTAATAEEIEVHMPPDTPDYTLMTQQAGNVKITVDGQTVRYKCKCDGSNEGLITADKVINNCKVDQCHTAVTNHKKWQYNSPLTPRNSEQGDRKGKIHIPFPLVNTTCRVPKARNPTVTYGKNRVTLLLHPDHPTLLSYRAMGRIPDYHEEWITNKKEISITVPAEGLEVTWGNNDPYKYWPQLSTNGTAHGHPHEIILYYYELYPTTTIAVLAAASIVITSLVGLSLGMCICARRRCITPYELTPGATIPFLLGVLCCARTAKAASYYEAATYLWNEQQPLFWLQLLIPLSAAIVVCNCLKLLPCCCKTLTFLAVMSIGARTVTAYEHATVIPNTVGVPCKTLVSRPGYSPMVLEMELQSVTLEPALSLDYITCEYKTITPSPYVKCCGTAECKAKNLPDYNCKVFTGVYPFMWGGAYCFCDAENTQLSEAHVEKSESCKTEFASAYRAHTASVSAKLRVFYQGNNITVSAYANGDHAVTVEDAKFVIGPLSSAWSPFDNKIVVYKGEVYNMDYPPFGAGRPGQFGDIQSRTPDSKDVYANTQLILQRPAAGAIHVPYSQAPSGFKYWLKEKGASLQHTAPFGCQIATNPVRAVNCAVGNIPVSIDIPDAAFTRVTDAPSITDMSCEVASCTHSSDFGGAAVIKYTASKKGKCAVHSVTNAVTIREPNVDVKGTAQLQIAFSTALASAEFKVQICSTLVHCSATCHPPKDHIVNYPSPHTTLGVQDISTTAMSWVQKITGGVGLVVAIAALILIIVLCVSFSRH

SEQ ID NO: 2014 - DNA, 2955 bp, Ross River virus
  source 1..2955: mol_type = genomic DNA
atgtctgccgctctgatgatgtgcatcctggccaacaccagctttccctgcagcagccctccttgctacccttgctgttacgagaagcagcccgagcagaccctgcggatgctggaagataacgtgaacagacccggctactacgagctgctggaagccagcatgacctgccggaacagaagccggcatagaagaagcgtgaccgagcacttcaacgtgtacaaggccaccagaccttacctggcctactgcgccgattgcggcgacggctacttttgctatagccccgtggccatcgagaagatcagagatgaggccagcgacggcatgctgaagatccaagtgtctgcccagatcggcctggacaaggccggaacacacgcccacaccaagatcagatatatggccggacacgacgtgcaagagagcaagagggatagcctgagagtgtacaccagcgccgcctgttctatccacggcaccatgggccacttcatcgtggcccattgtccacctggcgactacctgaaggtgtccttcgaggatgccgacagccacgtgaaggcctgcaaggtgcagtacaagcacgaccctttgcctgtgggccgcgagaagtttgttgtgcggcctcactttggcgtggaactgccttgtaccagctaccagctgaccaccgctcctaccgacgaagagatcgacatgcacacccctccagacatccccgacagaacactgctgagccagacagccggcaacgtgaagattacagccggcggacggaccatccggtacaactgtacatgcggcagagacaacgtgggcaccaccagcaccgacaagaccatcaatacctgcaagatcgaccagtgccacgccgccgtgacatctcacgacaagtggcagttcacaagccccttcgtgcccagagccgatcagacagctagacggggaaaagtgcacgtgccatttccactgaccaacgtgacctgcagagtgccccttgctagagcccctgatgtgacctacggcaagaaagaagtgaccctgagactgcaccctgatcaccccacactgttcagctacagaagcctgggagccgagcctcatccttacgaggaatgggttgacaagttcagcgagcggatcatccccgtgaccgaagagggcatcgagtaccagtggggcaacaatcctcctgtgcgactgtgggcccagctgacaacagagggaaaacctcacggatggccccacgagatcatccagtactactacggcctgtatcctgccgccacaatcgctgctgtttctggcgcttctctgatggcactgctgacactggccgccacctgttgcatgctggccaccgctagacggaagtgtctgaccccttacgctctgacacctggcgctgtggttcctctgactctgggccttctgtgctgtgcccctagagccaatgccgcctctttcgccgagacaatggcctacctgtgggacgagaacaagaccctgttctggatggaatttgccgctccagccgctgctctggctctgctggcttgttgtatcaagagcctgatctgctgctgcaagcccttcagcttcctggtgctgctgagtctgggagcctctgccaaggcctatgagcacacagccaccattcctaacgtcgtgggcttcccctacaaggcccacatcgagagaaacggcttcagccccatgacactgcagctggaagtggtggaaaccagcctggaacctacactgaaccttgagtacatcacgtgcgagtacaagaccgtggtgccctctccattcatcaagtgctgtggcaccagcgagtgcagctccaaagagcagcctgactaccagtgcaaggtgtacacaggcgtgtaccccttcatgtggggcggagcctactgcttctgcgacagcgagaatacccagctgagcgaggcctacgtggacagatccgatgtgtgcaagcacgatcacgccagcgcctataaggcccatacagccagcctgaaagccaccatcagaatcagctacggcacaatcaaccagaccaccgaggccttcgtgaatggcgagcacgccgtgaatgttggcggcagcaagttcatcttcggccccatctctaccgcttggagccctttcgacaacaagattgtggtgtataaggacgacgtctacaaccaggacttcccaccttacggcagcggacagcctggcagattcggcgacattcagagcagaaccgtggaaagcaaggacctgtacgccaacacagccctgaagctgagcagaccttctcctggcgtggtgcatgtgccctacacacagacacctagcggcttcaagtactggctgaaagagaagggcagctccctgaacacaaaggcccctttcggatgcaagatcaagacaaaccccgtcagagccatggactgtgccgtgggctctatccccgtgtctatggacatccctgactccgccttcaccagagtggtggatgctcctgccgtgacagacctgtcttgtcaggtggtcgtgtgcacccacagctccgattttggcggagtggccacactgagctacaagacagacaagcctggcaagtgcgccgtgcacagccacagcaatgtggctacactgcaagaggccaccgtggacgtgaaagaggatggcaaagtcaccgtgcacttcagcacagcctctgccagccccgcctttaaggtgtcagtgtgcgacgccaagaccacctgtacagccgcatgcgagcctccaaaggaccacatcgttccttacggcgccagccacaacaaccaggtgttccctgatatgagcggcaccgccatgacctgggttcagagactggcttctggactcggaggactggccctgattgctgtcgtggtgctggtcctggtcacctgtatcaccatgcggaga

SEQ ID NO: 2015 - protein, 985 aa, Ross River virus
MSAALMMCILANTSFPCSSPPCYPCCYEKQPEQTLRMLEDNVNRPGYYELLEASMTCRNRSRHRRSVTEHFNVYKATRPYLAYCADCGDGYFCYSPVAIEKIRDEASDGMLKIQVSAQIGLDKAGTHAHTKIRYMAGHDVQESKRDSLRVYTSAACSIHGTMGHFIVAHCPPGDYLKVSFEDADSHVKACKVQYKHDPLPVGREKFVVRPHFGVELPCTSYQLTTAPTDEEIDMHTPPDIPDRTLLSQTAGNVKITAGGRTIRYNCTCGRDNVGTTSTDKTINTCKIDQCHAAVTSHDKWQFTSPFVPRADQTARRGKVHVPFPLTNVTCRVPLARAPDVTYGKKEVTLRLHPDHPTLFSYRSLGAEPHPYEEWVDKFSERIIPVTEEGIEYQWGNNPPVRLWAQLTTEGKPHGWPHEIIQYYYGLYPAATIAAVSGASLMALLTLAATCCMLATARRKCLTPYALTPGAVVPLTLGLLCCAPRANAASFAETMAYLWDENKTLFWMEFAAPAAALALLACCIKSLICCCKPFSFLVLLSLGASAKAYEHTATIPNVVGFPYKAHIERNGFSPMTLQLEVVETSLEPTLNLEYITCEYKTVVPSPFIKCCGTSECSSKEQPDYQCKVYTGVYPFMWGGAYCFCDSENTQLSEAYVDRSDVCKHDHASAYKAHTASLKATIRISYGTINQTTEAFVNGEHAVNVGGSKFIFGPISTAWSPFDNKIVVYKDDVYNQDFPPYGSGQPGRFGDIQSRTVESKDLYANTALKLSRPSPGVVHVPYTQTPSGFKYWLKEKGSSLNTKAPFGCKIKTNPVRAMDCAVGSIPVSMDIPDSAFTRVVDAPAVTDLSCQVVVCTHSSDFGGVATLSYKTDKPGKCAVHSHSNVATLQEATVDVKEDGKVTVHFSTASASPAFKVSVCDAKTTCTAACEPPKDHIVPYGASHNNQVFPDMSGTAMTWVQRLASGLGGLALIAVVVLVLVTCITMRR

SEQ ID NO: 2016 - DNA, 2937 bp, Western equine encephalitis virus
  source 1..2937: mol_type = genomic DNA
atgtcactagttacagcgctgtgcgtgctttcgaatgtcacgttcccatgcgacaaaccacccgtgtgctattcactgacgccagaacgaacactcgacgtgctcgaagagaacgtcgacaatccaaattacgacacgctgctggagaacgtcttgaaatgtccatcacgccggcccaaacgaagcattaccgatgacttcacactgaccagtccctacctggggttctgcccgtattgcagacactcaacgccgtgtttcagcccaataaaaattgagaacgtgtgggacgaatctgatgatggatcgattagaatccaggtctcggcacaattcggctacaatcaggcaggcactgcggatgtcaccaaattccgttacatgtctttcgaccacgaccatgacatcaaggaagacagtatggagaaaatagctatcagcacatctggaccctgccgtcgtcttggccacaaagggtacttcctgttagctcaatgtcctccaggtgacagtgtaaccgtcagtatcacgagcggagcatctgagaattcatgcaccgtggagaaaaagatcaggaggaagtttgtcggtagagaggagtacttgttcccacccgtccatggaaagctggtaaagtgccacgtttacgatcacttgaaggagacgtctgccgggtacataaccatgcacaggccaggcccacacgcgtataagtcctatctggaggaagcgtcaggcgaagtgtacattaaaccaccttctggcaagaacgtcacctacgaatgtaagtgtggcgactacagcacaggtatcgtgagcacgcgaacgaagatgaacggctgcactaaagcaaaacagtgcattgcctacaagagcgaccaaacgaaatgggtcttcaactcgccggatcttattaggcacacagaccactcagtgcaaggtaaattgcacattccattccgcttgacaccgacagtctgcccggttccgttagctcacacgcctacagtcacgaagtggttcaaaggcatcaccctccacctgactgcaatgcgaccaacattgctgacaacgagaaaattggggctgcgagcagacgcaacagcagaatggattacagggtctacatccaggaatttttctgtggggcgagaagggctggagtacgtatggggtaaccatgaaccagtcagagtctgggcccaggagtcggcaccaggcgacccacatggatggccgcatgagatcatcatccactattatcatcggcatccagtctacactgtcattgtgctgtgtggtgtcgctcttgctatcctggtaggcactgcatcatcagcagcttgcatcgccaaagcaagaagagactgcctgacgccatacgcgcttgcaccgaacgcaacggtacccacagcattagcggttttgtgctgcattcggccaaccaacgctgaaacatttggagaaactttgaaccatctgtggtttaacaaccaaccgtttctctgggcacagttgtgcattcctctggcagcgcttgttattctgttccgctgcttttcatgctgcatgccttttttattggttgcaggcgtctgcctggggaaggtagacgccttcgaacatgcgaccactgtgccaaatgttccggggatcccgtataaggcgttggtcgaacgcgcaggttacgcgccacttaacctggagatcacggtcgtctcatcggaattaacaccttcaactaacaaggagtacgtgacctgcaaattccacacagtcattccttcaccacaagttaaatgctgcgggtccctcgagtgcaaggcatcctcaaaggcggattacacatgccgcgtttttggcggtgtgtaccctttcatgtggggaggcgcacaatgcttctgtgacagtgagaacacacaactgagtgaggcgtacgtcgagttcgctccagactgcactatagatcacgcagtcgcactaaaagttcacacagctgctctgaaagtcggcctgcgtatagtatacggcaacaccaccgcgcacctggatacgtttgtcaatggcgtcacgccaggttcctcacgggacctgaaggtcatagcagggccgatatcagccgctttttcaccctttgaccataaggtcgtcatcagaaaggggcttgtttacaactacgacttccctgagtatggagctatgaaaccaggagcgttcggcgatattcaagcatcctcgcttgatgctacagacatagtagcccgcactgacatacggctgctgaagccttctgtcaagaacatccacgtcccctacacccaagcagtatcagggtatgaaatgtggaagaacaactcaggacgacccctgcaagaaacagcaccatttggatgtaaaattgaagtggagcctctgcgagcgtctaactgtgcttacgggcacatccctatctcgattgacatccctgatgcagcttttgtgagatcatcagaatcaccaacaattttagaagttagctgcacagtagcagactgcatttattctgcagactttggtggttctctaacattacagtacaaagctgacagggagggacattgtccagttcactcccactccacgacagctgttttgaaggaagcgaccacacatgtgactgccgtaggcagcataacactacattttagcacatcgagcccacaagcaaattttatagtttcgctatgcggcaagaagtccacctgcaatgctgaatgtaaaccaccggccgaccacataattggagaaccacataaagtcgaccaagaattccaggcggcagtttccaaaacatcttggaactggctgcttgcactgtttgggggagcatcatccctcattgttgtaggacttatagtgttggtctgcagctctatgcttataaacacacgtagataa

SEQ ID NO: 2017 - protein, 978 aa, Western equine encephalitis virus
MSLVTALCVLSNVTFPCDKPPVCYSLTPERTLDVLEENVDNPNYDTLLENVLKCPSRRPKRSITDDFTLTSPYLGFCPYCRHSTPCFSPIKIENVWDESDDGSIRIQVSAQFGYNQAGTADVTKFRYMSFDHDHDIKEDSMEKIAISTSGPCRRLGHKGYFLLAQCPPGDSVTVSITSGASENSCTVEKKIRRKFVGREEYLFPPVHGKLVKCHVYDHLKETSAGYITMHRPGPHAYKSYLEEASGEVYIKPPSGKNVTYECKCGDYSTGIVSTRTKMNGCTKAKQCIAYKSDQTKWVFNSPDLIRHTDHSVQGKLHIPFRLTPTVCPVPLAHTPTVTKWFKGITLHLTAMRPTLLTTRKLGLRADATAEWITGSTSRNFSVGREGLEYVWGNHEPVRVWAQESAPGDPHGWPHEIIIHYYHRHPVYTVIVLCGVALAILVGTASSAACIAKARRDCLTPYALAPNATVPTALAVLCCIRPTNAETFGETLNHLWFNNQPFLWAQLCIPLAALVILFRCFSCCMPFLLVAGVCLGKVDAFEHATTVPNVPGIPYKALVERAGYAPLNLEITVVSSELTPSTNKEYVTCKFHTVIPSPQVKCCGSLECKASSKADYTCRVFGGVYPFMWGGAQCFCDSENTQLSEAYVEFAPDCTIDHAVALKVHTAALKVGLRIVYGNTTAHLDTFVNGVTPGSSRDLKVIAGPISAAFSPFDHKVVIRKGLVYNYDFPEYGAMKPGAFGDIQASSLDATDIVARTDIRLLKPSVKNIHVPYTQAVSGYEMWKNNSGRPLQETAPFGCKIEVEPLRASNCAYGHIPISIDIPDAAFVRSSESPTILEVSCTVADCIYSADFGGSLTLQYKADREGHCPVHSHSTTAVLKEATTHVTAVGSITLHFSTSSPQANFIVSLCGKKSTCNAECKPPADHIIGEPHKVDQEFQAAVSKTSWNWLLALFGGASSLIVVGLIVLVCSSMLINTRR

SEQ ID NO: 2018 - DNA, 2949 bp, Eastern equine encephalitis virus
  source 1..2949: mol_type = genomic DNA
atgagcctggccacagtgatgtgcgtgctggccaacatcacctttccatgcgaccagccaccttgcatgccctgctgctacgagaagaaccctcacgagacactgaccatgctggaacagaactacgacagccgggcctacgaccagctgctggatgctgccgtgaagtgcaacgccagacggaccagacgcgatctggatacccacttcacccagtacaagctggccagaccttatatcgccgactgtcccaactgcggccacagcagatgtgatagccctatcgccatcgaggaagtgcggggcgacgctcatgctggcgttatcagaatccagaccagcgccatgttcggcctgaaaaccgatggcgtggacctggcctacatgagcttcatgaacggcaagacccagaagtccatcaagatcgacaacctgcatgtgcggacaagcgccccttgtagcctggtgtctcaccacggctactacatcctggctcagtgccctccaggcgacacagtgacagtgggctttcacgacggccccaacagacacacatgtactgtggcccacaaggtggaatttcggcccgtgggcagagagaagtacagacaccctcctgagcacggcgtggaactgccctgcaatagatacacccacaagagagccgaccagggccactacgtggaaatgcatcagcctggactggtggccgatcacagcctgctgtctatccacagcgccaaagtgaagatcacagtgcccagcggagcccaagtgaagtactactgcaagtgccccgatgtgcggaagggcatcacaagcagcgatcacaccaccacctgtaccgacgtgaagcagtgcagagcctacctgatcgataacaagaaatgggtctacaacagcggcagactgcccagaggcgagggcgatacctttaagggaaagctgcacgtgcccttcgtgcctgtgaaggccaaatgtatcgccacactggcccctgagcctctggtggaacacaagcacagaaccctgatcctgcatctgcaccctgatcaccccacactgctgaccacaagatccctgggctccgacgccaatcctaccagacagtggatcgagaggcccaccaccgtgaactttaccgtgaccggcgagggccttgagtacacctggggaaatcacccacctaagagagtgtgggcccaagagtctggcgagggcaatcctcatggatggcctcacgaggtggtcgtgtactactacaacagataccctctgaccaccatcatcggcctgtgcacctgtgtggccatcatcatggtgtcctgcgtgacctctgtgtggctgctgtgcaggaccagaaacctgtgcatcaccccttataagctggcccctaacgctcaggtgccaatcctgctggctctgctgtgctgcatcaagcccaccagagccgatgataccctgcaggtcctgaattacctgtggaacaacaaccagaacttcttctggatgcagacgctgatccctctggccgctctgatcgtgtgcatgcggatgctgagatgcctgttctgttgcggccctgccttcctgcttgtttgtggtgctcttggcgccgctgcctatgaacacacagccgtgatgcccaacaaagtgggcatcccctacaaggccctggtggaaagacctggctatgctcccgtgcacctccagatccagctggtcaacaccagaatcatccccagcaccaacttggagtacatcacgtgcaagtacaagaccaaggtgccctctccagtggtcaagtgttgtggcgctacccagtgcaccagcaagccccatcctgattaccagtgccaggtgttcagcggcgtgtacccctttatgtggggcggagcctactgcttctgcgacaccgagaatacccagatgagcgaggcctacgtcgagcggagcgaggaatgttctatcgaccacgccaaggcctataaggtgcacaccggaacagtgcaggccatggtcaatatcacctacggctccgtgtcttggagaagcgccgacgtgtacgtgaacggcgaaacccctgccaagattggcgacgccaagctgatcatcggacccctgagttctgcttggagcccctttgataacaaggtcgtggtgtacggccacgaggtctacaattacgacttccccgagtacggcacaggcaaggctggatcttttggcgacctgcagagcagaaccagcacctccaatgacctgtacgccaacaccaacctgaagctgcagaggccacaggccggaatcgtgcacacaccctttacacaggtccccagcggcttcgagagatggaagaaggataagggcgctcccctgaacgacgtggccccttttggctgctctatcgccctggaacctctgagagccgagaattgtgccgtgggctctatccccatcagcatcgacattcccgacgccgcctttaccaggatcagcgagacacctaccgtgtccgatctggaatgcaagatcaccgagtgcacctacgccttcgacttcggcggaattgccaccgtggcctacaagtctagcaaggccggcaactgccctattcactctcctagcggagtggccgtgatcaaagaaaacgacgtgaccctggccgagagcggcagcttcacctttcacttcagcaccgccaacattcaccccgccttcaagctgcaagtgtgcacatctgccgtgacctgcaagggcgattgcaagccaccaaaggaccacatcgtggactaccccgctcagcacaccgagagctttacaagcgccatcagcgccacagcctggtcctggattaaggtgctcgtcggcggaaccagcgcctttattgtgctgggactgatcgccactgccgtggtggctctcgtgctgttttttcaccggcactga

SEQ ID NO: 2019 - protein, 982 aa, Eastern equine encephalitis virus
MSLATVMCVLANITFPCDQPPCMPCCYEKNPHETLTMLEQNYDSRAYDQLLDAAVKCNARRTRRDLDTHFTQYKLARPYIADCPNCGHSRCDSPIAIEEVRGDAHAGVIRIQTSAMFGLKTDGVDLAYMSFMNGKTQKSIKIDNLHVRTSAPCSLVSHHGYYILAQCPPGDTVTVGFHDGPNRHTCTVAHKVEFRPVGREKYRHPPEHGVELPCNRYTHKRADQGHYVEMHQPGLVADHSLLSIHSAKVKITVPSGAQVKYYCKCPDVRKGITSSDHTTTCTDVKQCRAYLIDNKKWVYNSGRLPRGEGDTFKGKLHVPFVPVKAKCIATLAPEPLVEHKHRTLILHLHPDHPTLLTTRSLGSDANPTRQWIERPTTVNFTVTGEGLEYTWGNHPPKRVWAQESGEGNPHGWPHEVVVYYYNRYPLTTIIGLCTCVAIIMVSCVTSVWLLCRTRNLCITPYKLAPNAQVPILLALLCCIKPTRADDTLQVLNYLWNNNQNFFWMQTLIPLAALIVCMRMLRCLFCCGPAFLLVCGALGAAAYEHTAVMPNKVGIPYKALVERPGYAPVHLQIQLVNTRIIPSTNLEYITCKYKTKVPSPVVKCCGATQCTSKPHPDYQCQVFSGVYPFMWGGAYCFCDTENTQMSEAYVERSEECSIDHAKAYKVHTGTVQAMVNITYGSVSWRSADVYVNGETPAKIGDAKLIIGPLSSAWSPFDNKVVVYGHEVYNYDFPEYGTGKAGSFGDLQSRTSTSNDLYANTNLKLQRPQAGIVHTPFTQVPSGFERWKKDKGAPLNDVAPFGCSIALEPLRAENCAVGSIPISIDIPDAAFTRISETPTVSDLECKITECTYAFDFGGIATVAYKSSKAGNCPIHSPSGVAVIKENDVTLAESGSFTFHFSTANIHPAFKLQVCTSAVTCKGDCKPPKDHIVDYPAQHTESFTSAISATAWSWIKVLVGGTSAFIVLGLIATAVVALVLFFHRH

SEQ ID NO: 2020 - DNA, 2943 bp, Venezuelan equine encephalitis virus
  source 1..2943: mol_type = genomic DNA
atgtccctggtcaccaccatgtgtctgctggccaacgtgacattcccttgcgctcagcctcctatctgctacgacagaaagcccgccgagacactggctatgctgagcgtgaacgtggacaaccccggctacgatgaactgctggaagccgccgtgaagtgccctggcagaaagagaagaagcaccgaggaactgttcaacgagtacaagctgacccggccttacatggcccggtgcattagatgtgccgtgggcagctgtcacagccctattgccattgaggccgtgaaaagcgacggccacgatggctacgtcagactgcagacaagcagccagtacggcctggacagcagcggcaatctgaagggcagaaccatgagatacgacatgcacggcaccatcaaagagatccctctgcaccaggtgtccctgtataccagcagaccctgccacatcgtggatggccacggctactttctgctggctagatgtcctgccggcgacagcatcaccatggagttcaagaaagacagcgtgcggcactcctgcagcgtgccctacgaagtgaagttcaaccctgtgggcagagagctgtatacacaccctccagagcacggcgtggaacaggcttgtcaggtgtacgcccacgacgcccagaatagaggcgcctacgtggaaatgcatctgcccggcagcgaagtggatagcagcctggtttctctgagcggcagcagcgtgacagtgacacctcctgatggaacaagcgccctggtggaatgtgaatgcggcggcaccaagatcagcgagacaatcaacaagaccaagcagttcagccagtgcaccaagaaagagcagtgccgggcctaccggctgcagaacgacaaatgggtctacaacagcgacaagctgcccaaggctgctggcgctacactgaagggaaaactgcacgtgccatttctgctcgccgacggcaaatgtaccgtgcctcttgctcccgagcctatgatcaccttcggcttcagaagcgtgtccctgaagctgcaccccaagaatcccacctacctgatcaccagacagctggccgatgagccccactacacacacgagctgatctctgagcctgccgtgcggaatttcaccgtgaccgagaaaggctgggagttcgtgtggggcaatcaccctcctaagcggttctgggcccaagagacagcccctggaaatcctcacggactgcctcacgaagtgatcacccactactaccacagataccccatgtccaccatcctgggcctgagcatctgtgccgccattgccacagtgtctgtggccgcttctacctggctgttttgccggtcaagagtggcctgtctgaccccttacagactgacccctaacgccaggattcctttctgcctggccgtgctgtgctgcgccagaacagctagagccgagacaacatgggagagcctggaccacctgtggaacaacaaccagcagatgttctggattcagctgctgatcccactggccgcactgatcgtggtcacaagactgctgagatgcgtgtgctgcgtggtgccctttctggttatggcaggcgcagctggtgccggcgcttatgaacatgccaccacaatgcctagccaggccggcatcagctacaacaccatcgtgaacagagccggctacgctcccctgcctatcagcatcacacccacaaagatcaagctgatccccaccgtgaacctcgaatacgtgacctgccactacaagaccggcatggacagccctgccatcaagtgctgtggcagccaagagtgcacccctacctacagacctgacgagcagtgcaaggtgttcaccggcgtgtacccctttatgtggggcggagcctactgcttctgcgacaccgagaatactcaggtgtccaaggcctacgtgatgaagtccgacgactgtctggccgatcacgccgaagcctataaggcccatacagccagcgtgcaggccttcctgaatatcacagtgggcgagcactccatcgtgaccaccgtgtatgtgaacggcgagacacccgtgaacttcaacggcgtgaagatcaccgccggacctctgtctacagcctggacacccttcgaccggaagatcgtgcagtatgccggcgaaatctacaactacgacttccccgagtatggcgccggacagcctggcgcctttggcgatattcagagcagaaccgtgtccagcagcgacctgtacgccaacaccaatctggtgctgcagaggcctaaagccggcgctatccatgtgccttacacacaggccccttccggctttgagcagtggaagaaggataaggcccctagcctgaagtttacagcccctttcggctgcgagatatacacaaaccccatccgggccgagaattgcgccgtgggatctatccctctggccttcgacatccccgacgcactgttcaccagagtgtccgagactcccacactgtctgccgccgagtgtaccctgaacgagtgtgtgtactccagcgacttcggcggaatcgccacagtgaagtactccgccagcaagagcggaaagtgcgctgtgcatgtgcctagcggaaccgccactctgaaagaggctgccgttgagctgacagagcagggctctgccaccatccacttcagcaccgccaacattcaccccgagttccggctgcaaatctgcacctcctacgtgacatgcaagggcgactgtcaccctccaaaggatcacatcgtgacacatccccagtatcacgcccagacctttactgccgccgtgtctaaaaccgcctggacctggctgacatctctgctcggaggatctgccgtgatcatcatcatcggactggtgctggccacaatcgtggctatgtacgtgctgaccaaccagaagcacaac

SEQ ID NO: 2021 - protein, 981 aa, Venezuelan equine encephalitis virus
MSLVTTMCLLANVTFPCAQPPICYDRKPAETLAMLSVNVDNPGYDELLEAAVKCPGRKRRSTEELFNEYKLTRPYMARCIRCAVGSCHSPIAIEAVKSDGHDGYVRLQTSSQYGLDSSGNLKGRTMRYDMHGTIKEIPLHQVSLYTSRPCHIVDGHGYFLLARCPAGDSITMEFKKDSVRHSCSVPYEVKFNPVGRELYTHPPEHGVEQACQVYAHDAQNRGAYVEMHLPGSEVDSSLVSLSGSSVTVTPPDGTSALVECECGGTKISETINKTKQFSQCTKKEQCRAYRLQNDKWVYNSDKLPKAAGATLKGKLHVPFLLADGKCTVPLAPEPMITFGFRSVSLKLHPKNPTYLITRQLADEPHYTHELISEPAVRNFTVTEKGWEFVWGNHPPKRFWAQETAPGNPHGLPHEVITHYYHRYPMSTILGLSICAAIATVSVAASTWLFCRSRVACLTPYRLTPNARIPFCLAVLCCARTARAETTWESLDHLWNNNQQMFWIQLLIPLAALIVVTRLLRCVCCVVPFLVMAGAAGAGAYEHATTMPSQAGISYNTIVNRAGYAPLPISITPTKIKLIPTVNLEYVTCHYKTGMDSPAIKCCGSQECTPTYRPDEQCKVFTGVYPFMWGGAYCFCDTENTQVSKAYVMKSDDCLADHAEAYKAHTASVQAFLNITVGEHSIVTTVYVNGETPVNFNGVKITAGPLSTAWTPFDRKIVQYAGEIYNYDFPEYGAGQPGAFGDIQSRTVSSSDLYANTNLVLQRPKAGAIHVPYTQAPSGFEQWKKDKAPSLKFTAPFGCEIYTNPIRAENCAVGSIPLAFDIPDALFTRVSETPTLSAAECTLNECVYSSDFGGIATVKYSASKSGKCAVHVPSGTATLKEAAVELTEQGSATIHFSTANIHPEFRLQICTSYVTCKGDCHPPKDHIVTHPQYHAQTFTAAVSKTAWTWLTSLLGGSAVIIIIGLVLATIVAMYVLTNQKHN

SEQ ID NO: 2022 - DNA, 1566 bp, Lyssavirus mokola
  source 1..1566: mol_type = genomic DNA
atgaacatcccctgcttcgccgtgatcctgagcctggccacaacacatagcctgggcgagttccctctgtatacaatccccgagaagatcgagaagtggacccctatcgacatgatccacctgagctgccccaacaacatgctgagcgaggaagagggctgcaacacagagagccccttcacctacttcgagctgaagtccggctatctggcccaccagaaggtgcccggctttacatgtaccggcgtggtcaatgaggccgagacatacaccaacttcgtgggctacgtgaccaccaccttcaagcggaagcacttcaagcctaccgtggccgcctgtagggacgcctacaactggaaagtgtccggcgatcccagatacgaggaaagcctgcacaccccttatcctgacagcagctggctgagaaccgtgacaaccaccaaagaggccctgctgatcatcagccccagcatcgtggaaatggacatctacggcagaaccctgcacagccctatgttccctagcggcaagtgcagcaagctgtaccctagcgtgcccagctgcaccaccaaccacgattacacactgtggctgcccgaggacagcagcctgtctctgatctgcgacatcttcaccagcagcagcggccagaaagccatgaacggcagcagaatctgcggcttcaaggacgagcggggcttctacagaagcctgaagggcagctgcaagctgacactgtgtggcaagcctggcatcagactgttcgatggcacctgggtgtccttcaccaagcctgatgtgcacgtgtggtgcacccctaaccagctcgtgaacatccacaacgaccggctggacgaggtggaacacctgatcgtggacgacatcatcaagaaacgggaagagtgcctggacaccctggaaaccatcctgatgagccagagcgtgtcctttcggcggctgagccacttcagaaagctggtgcctggctacggcaaggcctacacaatcctgaacggctccctgatggaaacgaacgtgtactacaagcgcgtggacagatgggccgacatcctgcctagtagaggctgcctgaaagtgggccagcagtgcatggaccctgtgaagggcgtgctgttcaacggaatcatcaagggccccgacggccagattctgatccctgagatgcagagcgagcagctgaagcagcacatggatctgctgaaggccgccatgtttcctctgcggcaccctctgatcaaccgcgaggccgtgtttaagaaggacggcaacgccgacgacttcgtggacctgcatatgcccgacgtgcagaaaagcgtgtccgatgtggatctgggcctgcctcactggggattttggctgcttgtgggcgctaccgtggtggcctttgtggttctggcttgcctgctgagagtgtgctgcagacggatgcggagaagaagaagcctgcgggctacacaggacatccctctgtctgttgctcccgctcctgtgcctagagccaaggttgtgtctagctgggagagcagcaagggccttcctggaaca

SEQ ID NO: 2023 - protein, 522 aa, Lyssavirus mokola
MNIPCFAVILSLATTHSLGEFPLYTIPEKIEKWTPIDMIHLSCPNNMLSEEEGCNTESPFTYFELKSGYLAHQKVPGFTCTGVVNEAETYTNFVGYVTTTFKRKHFKPTVAACRDAYNWKVSGDPRYEESLHTPYPDSSWLRTVTTTKEALLIISPSIVEMDIYGRTLHSPMFPSGKCSKLYPSVPSCTTNHDYTLWLPEDSSLSLICDIFTSSSGQKAMNGSRICGFKDERGFYRSLKGSCKLTLCGKPGIRLFDGTWVSFTKPDVHVWCTPNQLVNIHNDRLDEVEHLIVDDIIKKREECLDTLETILMSQSVSFRRLSHFRKLVPGYGKAYTILNGSLMETNVYYKRVDRWADILPSRGCLKVGQQCMDPVKGVLFNGIIKGPDGQILIPEMQSEQLKQHMDLLKAAMFPLRHPLINREAVFKKDGNADDFVDLHMPDVQKSVSDVDLGLPHWGFWLLVGATVVAFVVLACLLRVCCRRMRRRRSLRATQDIPLSVAPAPVPRAKVVSSWESSKGLPGT

SEQ ID NO: 2024 - DNA, 1536 bp, unidentified
  source 1..1536: mol_type = unassigned DNA
atgaagtgcctgctgtacctggccttcctgttcatcggcgtgaactgcaagtttaccatcgtgttccctcacaaccagaaaggcaactggaagaacgtgcccagcaactaccactactgccccagcagcagcgacctgaactggcacaatgacctgatcggcacagccctgcaagtgaagatgcccaagagccacaaggccatccaggccgatggatggatgtgccacgccagcaaatgggtcacaacctgcgacttccgttggtacggccccaagtacatcacccacagcatccgcagcttcacccctagcgtggaacagtgcaaagagagcatcgagcagaccaagcaaggcacctggctgaaccctggattcccacctcagagctgtggctacgccactgtgacagatgccgaggccgtgatcgtgcaagtgacacctcatcacgtgctggtggacgagtacaccggcgagtgggttgacagccagttcatcaacggcaagtgctccaactacatctgccccaccgtgcacaacagcaccacctggcacagcgactacaaagtgaagggcctgtgcgacagcaacctgatcagcatggacatcacctttttcagcgaggacggcgagctgagcagcctgggaaaagaaggcaccggcttcagaagcaactacttcgcctatgagacaggcggcaaggcctgcaagatgcagtattgcaagcactggggcgtcagactgcctagcggagtttggttcgagatggccgacaaggacctgtttgccgccgctagattccctgagtgtcctgagggcagcagcatctctgcccctagccagacatctgtggacgtgtccctgatccaggacgtggaaagaatcctggactacagcctgtgccaagagacatggtccaagatcagagccggcctgcctatcagccctgtggacctgtcttatctggcccctaagaaccctggcaccggacctgccttcaccatcatcaatggcaccctgaagtactttgagacacggtacatccgcgtggacattgccgctcctatcctgagcagaatggtcggaatgatcagcggcaccaccaccgagagggaactgtgggatgattgggccccttacgaggatgtggaaatcggccctaacggcgtgctgagaacaagcagcggctacaagttcccactgtatatgatcggccacggcatgctggactccgacctgcaccttagctctaaggcccaggtgttcgagcaccctcacattcaggatgccgccagccagctgcctgatgacgagagcctgttctttggcgataccggcctgagcaagaaccccatcgaactggtggaaggctggttcagcagctggaagtcctctatcgccagcttcttcttcatcatcgggctgattatcggcctgttcctggtgctgagagtgggcatccacctgtgcatcaagctgaagcacaccaagaagcggcaaatctacaccgacatcgagatgaaccggctgggcaagtga

SEQ ID NO: 2025 - protein, 511 aa, unidentified
MKCLLYLAFLFIGVNCKFTIVFPHNQKGNWKNVPSNYHYCPSSSDLNWHNDLIGTALQVKMPKSHKAIQADGWMCHASKWVTTCDFRWYGPKYITHSIRSFTPSVEQCKESIEQTKQGTWLNPGFPPQSCGYATVTDAEAVIVQVTPHHVLVDEYTGEWVDSQFINGKCSNYICPTVHNSTTWHSDYKVKGLCDSNLISMDITFFSEDGELSSLGKEGTGFRSNYFAYETGGKACKMQYCKHWGVRLPSGVWFEMADKDLFAAARFPECPEGSSISAPSQTSVDVSLIQDVERILDYSLCQETWSKIRAGLPISPVDLSYLAPKNPGTGPAFTIINGTLKYFETRYIRVDIAAPILSRMVGMISGTTTERELWDDWAPYEDVEIGPNGVLRTSSGYKFPLYMIGHGMLDSDLHLSSKAQVFEHPHIQDAASQLPDDESLFFGDTGLSKNPIELVEGWFSSWKSSIASFFFIIGLIIGLFLVLRVGIHLCIKLKHTKKRQIYTDIEMNRLGK

SEQ ID NO: 2026 - DNA, 1536 bp, unidentified
  source 1..1536: mol_type = unassigned DNA
atgaacttcctgctgctgaccttcatcgtgctgcccctgtgtagccacgccaagttcagcatcgtgttccctcagagccagaaaggcaactggaagaacgtgcccagcagctaccactactgccccagcagcagcgaccagaactggcacaatgacctgctgggaatcaccatgaaagtgaagatgcccaagacacacaaggccatccaggccgatggctggatgtgtcatgccgccaagtggatcaccacctgtgacttccgttggtacggccccaagtacatcacccacagcatccactccatccagcctaccagcgagcagtgcaaagagagcatcaagcagaccaagcaaggcacctggatgagccctggattcccacctcagaattgcggctacgccaccgtgacagattctgtggctgtggtggtgcaggccacacctcatcatgtgctggtggatgagtacaccggcgagtggatcgactctcagttccccaacggcaagtgcgagacagaggaatgcgaaaccgtgcacaacagcaccgtgtggtacagcgactacaaagtgaccggcctgtgcgacgccacactggtggataccgagatcaccttcttcagcgaggacggcaagaaagagtccatcggcaagcccaacaccggctacagaagcaactacttcgcctacgagaagggcgacaaagtgtgcaagatgaactactgcaagcacgctggcgtgcggctgccttctggtgtttggttcgagttcgtggaccaggacgtgtacgccgctgccaagttgcctgaatgtcctgtgggcgccacaatcagcgcccctacacagacatccgtcgacgtgtccctgatcctggacgtggaaagaatcctggactacagcctgtgccaagagacatggtccaagatccggtccaagcagcccgtgtctcctgtggacctgtcttatctggcccctaagaacccaggcacaggccctgccttcaccatcatcaatggcaccctgaagtactttgagacacggtacatccggatcgacatcgacaaccccatcatcagcaagatggtcggaaagatcagcggcagccagaccgagagggaactgtggacagagtggttcccttacgaaggcgtggaaatcggccccaacggaatcctgaaaacccctacaggctacaagttcccgctgttcatgatcggccacggcatgctggatagcgacctgcacaaaacaagccaggccgaggtgttcgagcaccctcatttggccgaggctcctaagcagctgcccgaggaagagacactgttcttcggcgataccggcatctccaagaatcccgtggaactgatcgaaggctggttcagctcctggaagtctaccgtcgtgaccttcttcttcgccatcggcgtgttcatcctgctgtacgtggtggccagaatcgtgatcgccgtgcggtatagataccagggcagcaacaacaagcggatctacaacgacatcgagatgagccggttccggaag

SEQ ID NO: 2027 - protein, 512 aa, unidentified
MNFLLLTFIVLPLCSHAKFSIVFPQSQKGNWKNVPSSYHYCPSSSDQNWHNDLLGITMKVKMPKTHKAIQADGWMCHAAKWITTCDFRWYGPKYITHSIHSIQPTSEQCKESIKQTKQGTWMSPGFPPQNCGYATVTDSVAVVVQATPHHVLVDEYTGEWIDSQFPNGKCETEECETVHNSTVWYSDYKVTGLCDATLVDTEITFFSEDGKKESIGKPNTGYRSNYFAYEKGDKVCKMNYCKHAGVRLPSGVWFEFVDQDVYAAAKLPECPVGATISAPTQTSVDVSLILDVERILDYSLCQETWSKIRSKQPVSPVDLSYLAPKNPGTGPAFTIINGTLKYFETRYIRIDIDNPIISKMVGKISGSQTERELWTEWFPYEGVEIGPNGILKTPTGYKFPLFMIGHGMLDSDLHKTSQAEVFEHPHLAEAPKQLPEEETLFFGDTGISKNPVELIEGWFSSWKSTVVTFFFAIGVFILLYVVARIVIAVRYRYQGSNNKRIYNDIEMSRFRK

SEQ ID NO: 2028 - DNA, 2055 bp, unidentified
  source 1..2055: mol_type = unassigned DNA
atgaagaaaaccaccaggcggagcagcagcgagacaatgatcctgctgatccatctgcctgtgatcctgaccacactgaccaagctgatctccggcgacctgatcaacttccccttccactgcaccaacctggaaaacatcaagtacagcaacctgagctgccccaccgtgtgggagacattcaagatcaagaccggcgacaaggtggaacggggcagcatgtgtagacctagcctgcacacccacgacctggaagagggctacctgtgctacaaggacacctggaccaccacctgtgacgagagctggtacttcagcaccgaagtgaagtacaagatcatccacgaggaagtgcacgacatcgactgcctggatgccctgatcgagtacaaagtgggcaagctgaaggcccctttcttccccgtggccacatgttactgggccagcagcaccaccgagagcatcaccttcatgatgatcaagccccacaacgcccctctggacccctacagcaatagaatcgtggaccccatcatccaggccgacagcggcgacaacctgaaaatctaccggaccacctttcctaagacacggtggatcagagaagtgaacaccacactggaagaacggtgcaacgtggccacctgggagtgccacgatatgacactgtacagcggctggctgacacaccctagcggcgcctttaagaccagcctgagaacaggactggtggtggacagccagatcatgggccacattctgctgcgggatacctgcaagatggacttctgtggcagacggggcttcagattccctgatggtggatggtggcggctgaccacagagaatgaagtgtccctgcaggacttcgagctgaacgacaccgtggtgcccaagtgcgacgacagatccagaaaccacgtgggctacaccgacctggactacaaccctgagaagatcgccctggaacagaagtctctgctcaagaccaccatgtgcagagagaagctggccgaactcggccaaggcaagggcatgagcctgtacgacaccacctatctgatccccaacgctcccggaagataccccgcctactacatctatcccgtgggcctgaacaagaccctggaaacccagatcctgaaagagaaaaccatcagcaaccctctgaccgccaagcggaaagaacacatgcccatcatgctgtacatggcccagtgccactacaccctgattgagttccccaatctggacagcaccggcacactgcggtacaccagtctggaagatcctgtgggcacaatcctggaaagcggcaagaatgtgtccctggccgatctgggcttcgaggacatcaatctggataacaccacatgcaagggcaacgactccgactgcttcaacaccaccacacctaaagagcccctgctggacagaaagttcaacatgaccaaccacacactgccctggcggcggtacagcaagagagaactgcaccacagagtgacctacaacggcatcacacactccccagtcggacactgggtgcagattccttatggcgccagcctgacagccaacctgcctgagcacctgattgaaaagcacagcacccactttttcgaccacgtgaccaagcagagcatcttcgagagagagctgcagaacggcgagatcagcatcgacgatctggaacagctgatcggcagaaagaccaatcacaccgatctgcccaagaaagtgcggaactgggtccagaacgccaaagaaagcgtcgtgggcatctttagagagttcggacacaccatccggctgggcctgagcatcgtgtcttttctgatcggcctgatcatcagcttcaaagtgtggaagaagtgccggaagaacaagaaagagacacagcagcagagcagaagcagccccatctacagaccccagaacatctatgagctggaagaaggccctatcagccctccacctctggctagacagagagagcacgacaacagcaacatcttccgcaagaccgatcctcggaaccccttctacagcaga

SEQ ID NO: 2029 - protein, 685 aa, unidentified
MKKTTRRSSSETMILLIHLPVILTTLTKLISGDLINFPFHCTNLENIKYSNLSCPTVWETFKIKTGDKVERGSMCRPSLHTHDLEEGYLCYKDTWTTTCDESWYFSTEVKYKIIHEEVHDIDCLDALIEYKVGKLKAPFFPVATCYWASSTTESITFMMIKPHNAPLDPYSNRIVDPIIQADSGDNLKIYRTTFPKTRWIREVNTTLEERCNVATWECHDMTLYSGWLTHPSGAFKTSLRTGLVVDSQIMGHILLRDTCKMDFCGRRGFRFPDGGWWRLTTENEVSLQDFELNDTVVPKCDDRSRNHVGYTDLDYNPEKIALEQKSLLKTTMCREKLAELGQGKGMSLYDTTYLIPNAPGRYPAYYIYPVGLNKTLETQILKEKTISNPLTAKRKEHMPIMLYMAQCHYTLIEFPNLDSTGTLRYTSLEDPVGTILESGKNVSLADLGFEDINLDNTTCKGNDSDCFNTTTPKEPLLDRKFNMTNHTLPWRRYSKRELHHRVTYNGITHSPVGHWVQIPYGASLTANLPEHLIEKHSTHFFDHVTKQSIFERELQNGEISIDDLEQLIGRKTNHTDLPKKVRNWVQNAKESVVGIFREFGHTIRLGLSIVSFLIGLIISFKVWKKCRKNKKETQQQSRSSPIYRPQNIYELEEGPISPPPLARQREHDNSNIFRKTDPRNPFYSR

SEQ ID NO: 2030 - DNA, 1890 bp, unidentified
  source 1..1890: mol_type = unassigned DNA
atgcagaccatgaagaaaacccatctgctggccttcaccatcttcggccagatcctgctggctagcagcctggtggttaacctgcctctgagatgcaacggccggaaggacctgctggtcaacagcctgaaatgccctctgcctagcaccgaagtgaaggtggacggcaaagtgaaagtgtacgagggcgacatctgcagaccccagatcaacgccaaggatgtggaagccggctacctgtgccacaaggacatctacaaggccatctgcgacgagacatggtacttcagcgccaccgtgaagcacgagattgagcacgcccctatcagcgacatcgagtgcatcgagggactgaccgagctgaagctgggcatcgtgcccaatcctcagttccctagcgtggactgctactggaacgcccggaccgaggaaaagcggacctacatcatcctgacacagcacgaccctgctctggacccctacagcaacaagatcaaggacaacgtggtggaccccgactgcgacttcaacctgtgcaagaccaacttcatcaacaccaagtggatcagggacaagaacaccaccgagatcgagagatgcgacgccaagaactgggactgtcacccctacaaaatctaccaaggctggatcagcaagagcgagatgatcggctggggcgaccctacacagagctacagctatacaggcctggtgctggacagccacatctacggacacatccccatgagcaagctgtgtcacaagaccttttgcggcaaagagggctatctgttccccgacaagagctggtggcagatcagaagcaagacccctgcctctccactgttcagagagctgaccctgaacggcagcagaagcgcctttcctgactgcgagacaatcaagacctacggctacgccgaggtggaagaggatgagagcagcgagatcatcagagagagcgccgagatccggcacgagatgtgtctggaaaccctgagcacactggccagcggctacgaggcctctttcagggacctcatgaagttcatccctcagaggcccggacctggcaaggcctactctctgaatagcaatggcaagcccagctactacaactaccactgggccggacatcctgccagcagcgcctctattcaagagcaggattgctactactacctggtggacatccccaagatccaggacgacggcatcctgaacatcaccggcatcggcaacaccgacgtgtgtggcaagctgctcgtgaacggctctagcatgacactgaacagcctgggcttcaagatcgaccaccactacgacgaccacatcgtggaaaccggcaccgatgtgcacgacgagatgaacatcaaagaacggatggtctggatcaagccggacaagattcaccctctgctgtgggtcggacccaacggcatcgtgattgaccaccagcacaagcagattcacttccccgtgttcagcagaggcgtggacagaatccctcactactggacccagaaacaccgggtcgtgaagtacagacacgccacacagctgaaaatctacaagcagtacctggacaaccccgagaagtctaacccctacgacttcaatgcctggaccggcagacacgtgaaccggacagaaatcccagtggccatcagcaactggttcagcggcgtgaaggacaccgtgttcgacaagattagcaagatcggcagctggctgaagtggtccttctacctgtgtttcatcttcgtgctgttcaaaggcggcctgctcgtgtggaacaagtacaagaccctgcggcaccagaccaagagaaccccaaagggcaagaactctcaggaccctgagaagctggacatctttggacagaccgtg

SEQ ID NO: 2031 - protein, 630 aa, unidentified
MQTMKKTHLLAFTIFGQILLASSLVVNLPLRCNGRKDLLVNSLKCPLPSTEVKVDGKVKVYEGDICRPQINAKDVEAGYLCHKDIYKAICDETWYFSATVKHEIEHAPISDIECIEGLTELKLGIVPNPQFPSVDCYWNARTEEKRTYIILTQHDPALDPYSNKIKDNVVDPDCDFNLCKTNFINTKWIRDKNTTEIERCDAKNWDCHPYKIYQGWISKSEMIGWGDPTQSYSYTGLVLDSHIYGHIPMSKLCHKTFCGKEGYLFPDKSWWQIRSKTPASPLFRELTLNGSRSAFPDCETIKTYGYAEVEEDESSEIIRESAEIRHEMCLETLSTLASGYEASFRDLMKFIPQRPGPGKAYSLNSNGKPSYYNYHWAGHPASSASIQEQDCYYYLVDIPKIQDDGILNITGIGNTDVCGKLLVNGSSMTLNSLGFKIDHHYDDHIVETGTDVHDEMNIKERMVWIKPDKIHPLLWVGPNGIVIDHQHKQIHFPVFSRGVDRIPHYWTQKHRVVKYRHATQLKIYKQYLDNPEKSNPYDFNAWTGRHVNRTEIPVAISNWFSGVKDTVFDKISKIGSWLKWSFYLCFIFVLFKGGLLVWNKYKTLRHQTKRTPKGKNSQDPEKLDIFGQTV

SEQ ID NO: 2032 - DNA, 1665 bp, Hepacivirus C
  source 1..1665: mol_type = genomic DNA
taccaagtgcgcaactccacagggctttatcatgtcaccaatgattgccctaactcgagtattgtgtacgaggcgcacgatgccatcctgcatactccggggtgtgtcccttgcgttcgcgagggcaacgtctcgaggtgttgggtggcgatgacccccacggtagccaccagggacggcaaactccccgcgacgcagcttcgacgtcacatcgatctgcttgtcgggagcgccaccctctgttcggccctctacgtgggggatctgtgcgggtccgtcttccttattggtcaactgtttaccttctctcccaggcgccactggacaacgcaaggctgcaattgttctatctaccccggccatataacgggtcatcgcatggcatgggatatgatgatgaactggtcccctacggcggcgttggtaatggctcagctgctccggatcccacaagccatcttggatatgatcgctggtgctcactggggagtcctggcgggcatagcgtatttctccatggtggggaactgggcgaaggtcctggtagtgctgttgctgtttgccggcgtcgacgcggaaaccatcgtctccgggggacaagccgcccgcgccatgtctggacttgttagtctcttcacaccaggcgctaagcagaacatccagctgatcaacaccaacggcagttggcacatcaatagcacggccttgaactgcaatgaaagccttaacaccggctggttagcagggcttatctatcaacacaaattcaactcttcgggctgtcccgagaggttggccagctgccgacgccttaccgattttgaccagggctggggccctatcagtcatgccaacggaagcggccccgaccaacgcccctattgttggcactaccccccaaaaccttgcggtatcgtgcccgcaaagagcgtatgtggcccggtatattgcttcactcccagccccgtggtggtgggaacgaccgacaggtcgggcgcgcctacctacaactggggtgcaaatgacacggacgtcttcgtcctcaacaacaccaggccaccgctgggcaattggttcggttgcacctggatgaactcaactggattcaccaaggtatgcggagcgcctccttgtgtgattggaggggggggcaacaacaccctgcactgccccactgattgtttccgcaagcatccggaagccacatactctcggtgcggctctggtccctggatcacacccagatgcctggtcgactatccatataggctttggcattacccttgtaccatcaactataccatttttaaagttaggatgtacgtgggaggggtcgagcacaggctggatgctgcctgcaactggacgcggggcgaacgttgcgatctggaagatagggacaggtccgagctcagcccgttgctgctgtccaccacgcagtggcaggtccttccgtgttcattcacgaccctgccagccttgtccaccggcctcatccacctccaccagaacattgtggacgtgcagtacctgtacggggtggggtcaagcatcgcgtcctgggccatcaagtgggagtacgtcgttctcctgttccttctgcttgcagacgcgcgcgtctgctcctgcttgtggatgatgctactcatatcccaggcggaggcg

SEQ ID NO: 2033 - protein, 555 aa, Hepacivirus C
YQVRNSTGLYHVTNDCPNSSIVYEAHDAILHTPGCVPCVREGNVSRCWVAMTPTVATRDGKLPATQLRRHIDLLVGSATLCSALYVGDLCGSVFLIGQLFTFSPRRHWTTQGCNCSIYPGHITGHRMAWDMMMNWSPTAALVMAQLLRIPQAILDMIAGAHWGVLAGIAYFSMVGNWAKVLVVLLLFAGVDAETIVSGGQAARAMSGLVSLFTPGAKQNIQLINTNGSWHINSTALNCNESLNTGWLAGLIYQHKFNSSGCPERLASCRRLTDFDQGWGPISHANGSGPDQRPYCWHYPPKPCGIVPAKSVCGPVYCFTPSPVVVGTTDRSGAPTYNWGANDTDVFVLNNTRPPLGNWFGCTWMNSTGFTKVCGAPPCVIGGGGNNTLHCPTDCFRKHPEATYSRCGSGPWITPRCLVDYPYRLWHYPCTINYTIFKVRMYVGGVEHRLDAACNWTRGERCDLEDRDRSELSPLLLSTTQWQVLPCSFTTLPALSTGLIHLHQNIVDVQYLYGVGSSIASWAIKWEYVVLLFLLLADARVCSCLWMMLLISQAEA

SEQ ID NO: 2034 - DNA, 2037 bp, unidentified
  source 1..2037: mol_type = unassigned DNA
atgggccctccttcttctgccgctgcttgtagcagaggcagccccagaatcctgagagttagagccggcggaatcagcttcttctacaccatcatggccgtcctgctgctgctcctggttgttgaagctggcgctattctggcccctgccacacatgcctgtagagccaatggccagtacttcctgaccaactgctgtgcccctgaggacatcggcttttgtctggaaggcggatgtctggtggccctgggctgtaccatctgcaccgatcaatgctggcctctgtaccaggctggcctggctgttagacctggaaagtctgccgctcagctcgtgggagaactgggctctctgtatggccctctgagcgtgtcagcctatgtggccggaatcctcggcctgggcgaagtgtattctggcgtgctgacagtgggcgtcgccctgactagaagagtgtaccccgtgcctaatctgacctgtgccgtggcctgtgaactgaagtgggagagcgagttttggcggtggacagaacagctggcctccaactactggattctggaatacctgtggaaggtgcccttcgacttttggagaggcgtgatcagcctgacacctctgctcgtgtgtgtggctgccctgctgcttctggaacagcggatcgtgatggtgttcctgctggtcacaatggccggcatgtctcaaggcgctccagcctctgttctgggcagcagacctttcgattacggcctgacctggcagacctgtagctgcagagctaacggcagcagattcagcaccggcgagaaagtgtgggacagaggcaatgtgaccctgcagtgcgactgccctaatggcccttgggtttggctgcctgccttctgtcaggctatcggctggggcgaccctatcacctattggagccacggccagaaccagtggcctctcagctgtcctcagtacgtgtacggcagcgccacagtgacttgtgtgtggggaagcgccagttggttcgccagcacaagcggcagagacagcaagatcgatgtgtggtccctggtgcctgtgggctctgccacatgtactattgccgctctgggctccagcgacagagatacagttcctggcctgagcgagtggggcatcccttgtgtgacatgcgtgctggatagaaggcctgccagctgtggaacctgtgtgcgagattgctggccagagacaggcagcgtgcggttcccatttcacagatgtggcgtgggccccagactgaccaaggatctggaagccgtgcctttcgtgaaccggaccacaccattcaccatcagaggccctctgggcaatcaaggcagagggaatcctgtgcggagccctctcggctttggcagctatgccatgaccagaatccgggacacactgcacctggtggaatgccctacaccagccatcgaacctccaaccggcaccttcggctttttccctggaacacctcctctgaacaactgcatgctgctgggcaccgaagtgtctgaagctcttggcggagctggactgaccggcggcttttatgagcctctcgtgcggagatgcagcaagctgatgggaagcagaaaccctgtgtgccctggctttgcttggctgagttccggcagacccgatggctttatccacgtgcagggccatctgcaagaagtggacgccggcaacttcatccctccacctagatggctgctgctggacttcgtgttcgtgctgctgtacctgatgaagctcgccgaggctagactggtgcctctgattctgcttctgctgtggtggtgggtcaaccagttggctgtgcttggactgcctgcagtggaagctgctgtggccggcgaagtttttgctggccctgctctgtcttggtgcctgggccttcctgtggtgtctatgattctgggcctcgccaacctggtgctgtacttcagatggctgggccctcagcggctgatgtttctggtcctgtggaaactggccaggggcgcctttcctctggctctgctc

SEQ ID NO: 2035 - protein, 679 aa, unidentified
MGPPSSAAACSRGSPRILRVRAGGISFFYTIMAVLLLLLVVEAGAILAPATHACRANGQYFLTNCCAPEDIGFCLEGGCLVALGCTICTDQCWPLYQAGLAVRPGKSAAQLVGELGSLYGPLSVSAYVAGILGLGEVYSGVLTVGVALTRRVYPVPNLTCAVACELKWESEFWRWTEQLASNYWILEYLWKVPFDFWRGVISLTPLLVCVAALLLLEQRIVMVFLLVTMAGMSQGAPASVLGSRPFDYGLTWQTCSCRANGSRFSTGEKVWDRGNVTLQCDCPNGPWVWLPAFCQAIGWGDPITYWSHGQNQWPLSCPQYVYGSATVTCVWGSASWFASTSGRDSKIDVWSLVPVGSATCTIAALGSSDRDTVPGLSEWGIPCVTCVLDRRPASCGTCVRDCWPETGSVRFPFHRCGVGPRLTKDLEAVPFVNRTTPFTIRGPLGNQGRGNPVRSPLGFGSYAMTRIRDTLHLVECPTPAIEPPTGTFGFFPGTPPLNNCMLLGTEVSEALGGAGLTGGFYEPLVRRCSKLMGSRNPVCPGFAWLSSGRPDGFIHVQGHLQEVDAGNFIPPPRWLLLDFVFVLLYLMKLAEARLVPLILLLLWWWVNQLAVLGLPAVEAAVAGEVFAGPALSWCLGLPVVSMILGLANLVLYFRWLGPQRLMFLVLWKLARGAFPLALL

SEQ ID NO: 2036 - DNA, 2583 bp, unidentified
  source 1..2583: mol_type = unassigned DNA
atgggctgtagcaccgaccagaccatctgtagccctgttgtgggcgccgactacaataccagctctggctgcagagccctgaacggctctgatcactgtggcggcagcagctgtagaagccctagtagagtgcaggccgctcggagagttctgcagctgtgtgcttttctggccctgatcggcagcggcatgtgcagcatcagaagcaagaccgagggcagaatcgagagcggccagatcctgcagtctcagagagcttgttggaccggcgagggcttcgccttcttcagcaactgctgcaaccagagcgacatcatgtggtgcctgcaccgttggtgcgtgaccagacctggatgtctcgtgtgcaccggcaacgccacacatcctgtgtgctgggattatctcggaagcggcgtgtccagaaggcctgccagaaggcttggagaaggcgccgaaatgctgctgcggctgattggaattgccggctggctgggactgctggctgaagctcttggcatgagcgagatgtacgccgccatcctgtgcttcggctttatcgcttggtacggctggggcatccccaagacactcgtgtgtactgtgtgccctgccgtgaatatcagcccctacagctttctgagccccgacacaatcgccttcggcacctggattctgcaactgcctggactgctgtggcagatgttcgtgaacttccccatcctgtactccacatggattctgtggctgctgctgagcggcaagacagtggccgtgattgccatcctgctggcctctccaacagtgatggcctacaagcaccccagcgagagctacctgaagtactgcaccatcaccaatgccagcgccgccatgaactgcgattgcccttttggcaccttcaccagaaacaccgagagccggttcagcatccccaggttctgccctgtgaagatcgagagcagcaccttcatctgctcttggggcagctggtggtggttcgccgagaacatcaccagaccttacagcgacgtgggcatgcctcctgctcctattagcgccctgtgctacatctacagcaacaacgaccctcctccttggtactacaacaccaccatcattccccagaactgccggaacagcacagtggaccctacaacagccccttgcagagataagtggggcaatgccaccgcctgcatcctggacagaagaagcagattctgcggcgactgctacggcggctgcttctacacaaatggcagccacgaccgcagctgggacagatgtggcatcggctatagagatggcctgatcgagtttgtgcagctcggccagattcggcccaacatcagcaataccaccatcgagctgctggcaggcgcctctctggttattgcttctggactgaggcctggctacggctgcagtagagcacatggcgtggtgcactgttacaggtgccccagctaccgcgacctggaacagtttggacctggcctcggaaaatgggtgccactgcctggcgaacctgtgcctgagctgtgcatcaatcctcagtgggctagacggggcttcagagtgtccaacaatcccctgagcctgatccagaccttcgtcgaggatattttcctggctcctttctgcaaccccacacctggcagagtccgcgtgtgcaacaacaccgccttctatcctagaggcggcggattcgtgcagctgatcggagatgtgcaggtcctgacacctaacaccgccagcctgcatagcctgctgacactgatctccctgatcctgctcgtgtgcgtggtgtccggcgctagattcgtgcccctgatcatcatattcttttggagcgtgcggcacgtgtacgccagctgttacctgtcttgtgactgggccgtgtgcaatgacgccttctgctttacctctggcacctgtgccaccttcaacgacgtgctgtgtctgcctgtggccaccagaatcagctcttgtggacatgccgtgcctccacctgacagaggatgggaagtgcctgctgctctgtcttgggccatcagcagaaccaccggcctgaccttcgacgtgttcagcttcatccagtacctgcctaccgtgcctggcaacaactccgacatcatctactgcggcgagcccaccttcttcggcgatctgaccggaatctactggccctactttctgccaggcgtcctgctgctgtacctgacaccatttctgggcctgagactgatgctggccggcttcaacatcgacggactgttccctatcagacacgccaccgccgctctgagattcagcaccagtagagtgaccctgtctgtggtggccgccttcctgatctacatcctgtctcaccccgtgaacgctgccctgaacagaatgtttctggccagcgccaacctggaaatgatcctgagcttcgacacctaccacgagacaatcctgtatatcgtctgcctgatgctctacctgcaagtgtcccctagagccggactggctgctatggtggccatcaagctgagcagaggcctgctgtttgctgtggtgctggctcacggtgtctgt

SEQ ID NO: 2037 - protein, 861 aa, unidentified
MGCSTDQTICSPVVGADYNTSSGCRALNGSDHCGGSSCRSPSRVQAARRVLQLCAFLALIGSGMCSIRSKTEGRIESGQILQSQRACWTGEGFAFFSNCCNQSDIMWCLHRWCVTRPGCLVCTGNATHPVCWDYLGSGVSRRPARRLGEGAEMLLRLIGIAGWLGLLAEALGMSEMYAAILCFGFIAWYGWGIPKTLVCTVCPAVNISPYSFLSPDTIAFGTWILQLPGLLWQMFVNFPILYSTWILWLLLSGKTVAVIAILLASPTVMAYKHPSESYLKYCTITNASAAMNCDCPFGTFTRNTESRFSIPRFCPVKIESSTFICSWGSWWWFAENITRPYSDVGMPPAPISALCYIYSNNDPPPWYYNTTIIPQNCRNSTVDPTTAPCRDKWGNATACILDRRSRFCGDCYGGCFYTNGSHDRSWDRCGIGYRDGLIEFVQLGQIRPNISNTTIELLAGASLVIASGLRPGYGCSRAHGVVHCYRCPSYRDLEQFGPGLGKWVPLPGEPVPELCINPQWARRGFRVSNNPLSLIQTFVEDIFLAPFCNPTPGRVRVCNNTAFYPRGGGFVQLIGDVQVLTPNTASLHSLLTLISLILLVCVVSGARFVPLIIIFFWSVRHVYASCYLSCDWAVCNDAFCFTSGTCATFNDVLCLPVATRISSCGHAVPPPDRGWEVPAALSWAISRTTGLTFDVFSFIQYLPTVPGNNSDIIYCGEPTFFGDLTGIYWPYFLPGVLLLYLTPFLGLRLMLAGFNIDGLFPIRHATAALRFSTSRVTLSVVAAFLIYILSHPVNAALNRMFLASANLEMILSFDTYHETILYIVCLMLYLQVSPRAGLAAMVAIKLSRGLLFAVVLAHGVC

SEQ ID NO: 2038 - DNA, 2022 bp, Zika virus
  source 1..2022: mol_type = genomic DNA
atggcggaggtcactagacgtgggagtgcatactatatgtacttggacagaaacgatgctggggaggccatatcttttccaaccacattggggatgaataagtgttatatacagatcatggatcttggacacatgtgtgatgccaccatgagctatgaatgccctatgctggatgagggggtggaaccagatgacgtcgattgttggtgcaacacgacgtcaacttgggttgtgtacggaacctgccatcacaaaaaaggtgaagcacggagatcaagaagagctgtgacgctcccttcccattccactaggaagctgcaaacgcggtcgcaaacctggttggaatcaagagaatacacaaagcacttgattagagtcgaaaattggatattcaggaaccctggcttcgcgttagcagcagctgctatcgcttggcttttgggaagctcaacgagccaaaaagtcatatacttggtcatgatactgctgattgccccggcatacagcatcaggtgcataggagtcagcaatagggactttgtggaaggtatgtcaggtgggacttgggttgatgttgtcttggaacatggaggttgtgtcaccgtaatggcacaggacaaaccgactgtcgacatagagctggttacaacaacagtcagcaacatggcggaggtaagatcctactgctatgaggcatcaatatcagacatggcttcggacagccgctgcccaacacaaggtgaagcctaccttgacaagcaatcagacactcaatatgtctgcaaaagaacgttagtggacagaggctggggaaatggatgtggactttttggcaaagggagcctggtgacatgcgctaagtttgcatgctccaagaaaatgaccgggaaaagcatccagccagagaatctggagtaccggataatgctgtcagttcatggctcccagcacagtgggatgatcgttaatgacacaggacatgaaactgatgagaatagagcgaaagttgagataacgcccaattcaccaagagccgaagccaccctggggggttttggaagcctaggacttgattgtgaaccgaggacaggccttgacttttcagatttgtattacttgactatgaataacaagcactggttggttcacaaggagtggttccacgacattccattaccttggcacgctggggcagacaccggaactccacactggaacaacaaagaagcactggtagagttcaaggacgcacatgccaaaaggcaaactgtcgtggttctagggagtcaagaaggagcagttcacacggcccttgctggagctctggaggctgagatggatggagcaaagggaaggctgtcctctggccacttgaaatgtcgcctgaaaatggataaacttagattgaagggcgtgtcatactccttgtgtactgcagcgttcacattcaccaagatcccggctgaaacactgcacgggacagtcacagtggaggtacagtacgcagggacagatggaccttgcaaggttccagctcagatggcggtggacatgcaaactctgaccccagttgggaggttgataaccgctaaccccgtaatcactgaaagcactgagaactctaagatgatgctggaacttgatccaccatttggggactcttacattgtcataggagtcggggagaagaagatcacccaccactggcacaggagtggcagcaccattggaaaagcatttgaagccactgtgagaggtgccaagagaatggcagtcttgggagacacagcctgggactttggatcagttggaggcgctctcaactcattgggcaagggcatccatcaaatttttggagcagctttcaaatcattgtttggaggaatgtcctggttctcacaaattctcattggaacgttgctgatgtggttgggtctgaacacaaagaatggatctatttcccttatgtgcttggccttagggggagtgttgatcttcttatccacagccgtctctgctgat

SEQ ID NO: 2039 - protein, 674 aa, Zika virus
MAEVTRRGSAYYMYLDRNDAGEAISFPTTLGMNKCYIQIMDLGHMCDATMSYECPMLDEGVEPDDVDCWCNTTSTWVVYGTCHHKKGEARRSRRAVTLPSHSTRKLQTRSQTWLESREYTKHLIRVENWIFRNPGFALAAAAIAWLLGSSTSQKVIYLVMILLIAPAYSIRCIGVSNRDFVEGMSGGTWVDVVLEHGGCVTVMAQDKPTVDIELVTTTVSNMAEVRSYCYEASISDMASDSRCPTQGEAYLDKQSDTQYVCKRTLVDRGWGNGCGLFGKGSLVTCAKFACSKKMTGKSIQPENLEYRIMLSVHGSQHSGMIVNDTGHETDENRAKVEITPNSPRAEATLGGFGSLGLDCEPRTGLDFSDLYYLTMNNKHWLVHKEWFHDIPLPWHAGADTGTPHWNNKEALVEFKDAHAKRQTVVVLGSQEGAVHTALAGALEAEMDGAKGRLSSGHLKCRLKMDKLRLKGVSYSLCTAAFTFTKIPAETLHGTVTVEVQYAGTDGPCKVPAQMAVDMQTLTPVGRLITANPVITESTENSKMMLELDPPFGDSYIVIGVGEKKITHHWHRSGSTIGKAFEATVRGAKRMAVLGDTAWDFGSVGGALNSLGKGIHQIFGAAFKSLFGGMSWFSQILIGTLLMWLGLNTKNGSISLMCLALGGVLIFLSTAVSAD

SEQ ID NO: 2040 - DNA, 1944 bp, Marburg marburgvirus
  source 1..1944: mol_type = genomic DNA
atgaagacaacctgcttcctgatcagcctgatcctgatccagggcaccaagaacctgcctatcctggaaatcgccagcaacaaccagcctcagaacgtggacagcgtgtgtagcggcaccctgcagaaaaccgaggacgtgcacctgatgggctttaccctgagcggccagaaggtggccgattctccactggaagccagcaagagatgggccttcagaacaggcgtgccacctaagaacgtcgagtacaccgaaggcgaggaagccaagacctgctacaacatcagcgtgacagaccccagcggcaagagcctgttgctcgaccctcctaccaacatccgggactaccccaagtgcaagaccatccaccacatccagggccagaatcctcacgctcagggaattgccctgcacctgtggggcgcctttttcctgtatgatcggatcgcctccaccaccatgtaccgcggcaaagtgttcaccgagggcaatatcgccgccatgatcgtgaacaagaccgtgcacaagatgatcttcagccggcaaggccagggctacagacacatgaatctgaccagcaccaacaagtactggaccagcagcaacggcacccagaccaatgataccggctgtttcggagccctgcaagagtacaactccaccaagaatcagacatgcgcccctagcaagatccctcctcctttgcctactgctcggcccgagatcaagctgacaagcacccctaccgatgccaccaagctgaacaccaccgatcctagcagcgacgacgaggatctggccacatctggatctggctctggcgagagagagccacacaccacatctgacgccgtgacaaagcagggcctgagcagcacaatgccacctacaccttctccacagcctagcacacctcagcaaggcggcaacaacaccaaccactctcaggatgccgtgaccgagctggacaagaacaataccaccgctcagcccagcatgcctcctcacaacaccacaaccatctccaccaacaatacctccaagcacaacttcagcacactgagcgcccctctgcagaataccaccaacgacaacacccagagcaccatcaccgagaacgagcagacaagcgctcccagcatcaccacactgcctccaaccggcaatcctaccaccgccaagagcaccagctctaagaagggccctgccacaacagcccctaacaccaccaatgagcacttcacaagcccacctccaacacctagcagcactgcccagcacctggtgtacttcagacggaagagatccatcctttggcgcgagggcgatatgttccccttcctggacggcctgatcaacgcccctatcgacttcgaccccgtgccaaacaccaagacaatcttcgacgagagcagcagcagcggcgcttctgccgaagaagatcagcacgcctctccaaacatctctctgaccctgagctacttccccaacatcaacgagaacaccgcctacagcggcgagaatgagaacgattgtgacgccgagctgcggatttggagcgtgcaagaggatgatctggctgccggcctgagctggattcctttttttggccctggcatcgagggcctgtataccgccgtgctgattaagaaccagaacaacctcgtgtgccggctgcggagactggccaatcagacagccaagtctctggaactgctgctgagagtgaccaccgaggaacggaccttctctctgatcaaccggcacgccatcgactttctgctgaccagatggggcggcacatgcaaagtgctgggccctgattgctgcatcggaatcgaggacctgagcaagaacatctccgagcagatcgaccagatcaagaaggacgagcagaaagaaggcaccggctggggacttggcggaaagtggtggacatctgat

SEQ ID NO: 2041 - protein, 648 aa, Marburg marburgvirus
MKTTCFLISLILIQGTKNLPILEIASNNQPQNVDSVCSGTLQKTEDVHLMGFTLSGQKVADSPLEASKRWAFRTGVPPKNVEYTEGEEAKTCYNISVTDPSGKSLLLDPPTNIRDYPKCKTIHHIQGQNPHAQGIALHLWGAFFLYDRIASTTMYRGKVFTEGNIAAMIVNKTVHKMIFSRQGQGYRHMNLTSTNKYWTSSNGTQTNDTGCFGALQEYNSTKNQTCAPSKIPPPLPTARPEIKLTSTPTDATKLNTTDPSSDDEDLATSGSGSGEREPHTTSDAVTKQGLSSTMPPTPSPQPSTPQQGGNNTNHSQDAVTELDKNNTTAQPSMPPHNTTTISTNNTSKHNFSTLSAPLQNTTNDNTQSTITENEQTSAPSITTLPPTGNPTTAKSTSSKKGPATTAPNTTNEHFTSPPPTPSSTAQHLVYFRRKRSILWREGDMFPFLDGLINAPIDFDPVPNTKTIFDESSSSGASAEEDQHASPNISLTLSYFPNINENTAYSGENENDCDAELRIWSVQEDDLAAGLSWIPFFGPGIEGLYTAVLIKNQNNLVCRLRRLANQTAKSLELLLRVTTEERTFSLINRHAIDFLLTRWGGTCKVLGPDCCIGIEDLSKNISEQIDQIKKDEQKEGTGWGLGGKWWTSD

SEQ ID NO: 2042 - DNA, 1731 bp, Nipah henipavirus
  source 1..1731: mol_type = genomic DNA
atgaagaagatcaacgagggcctgctggacagcaagatcctgagcgccttcaacaccgtgatcgccctgctgggcagcatcgtgatcattgtgatgaacatcatgatcatccagaactacacccggagcaccgacaaccaggccgtgatcaaggacgccctgcagggaatccagcagcagatcaagggcctggccgacaagatcggcaccgagatcggccccaaagtgagcctgatcgacaccagcagcaccatcaccatccccgccaacatcggcctgctgggatccaagatcagccagagcaccgccagcatcaacgagaacgtgaacgagaagtgcaagttcaccctgccccccctgaagatccacgagtgcaacatcagctgccccaaccccctgcccttccgggagtaccggccccagaccgagggcgtgagcaacctggtgggcctgcccaacaacatctgcctgcagaaaaccagcaaccagatcctgaagcccaagctgatctcctacaccctgcccgtggtgggccagagcggcacctgcatcaccgaccccctgctggccatggacgagggctacttcgcctacagccacctggagcggatcggcagctgcagccggggagtgagcaagcagcggatcatcggcgtgggcgaagtgctggaccggggcgacgaagtgcccagcctgttcatgaccaacgtgtggaccccccccaaccccaacaccgtgtaccactgcagcgccgtgtacaacaacgagttctactacgtgctgtgcgccgtgagcaccgtgggcgaccccatcctgaacagcacctactggagcggcagcctgatgatgacccggctggccgtgaagcctaagagcaacggcggaggctacaaccagcaccagctggccctgcggagcatcgagaagggccggtacgacaaagtgatgccctacggccccagcggcatcaagcagggcgacaccctgtacttccccgccgtgggcttcctggtgcggaccgagttcaagtacaacgacagcaactgccccatcaccaagtgccagtacagcaagcccgagaactgccggctgagcatgggcatccggcccaacagccactacatcctgcggagcggcctgctgaagtacaacctgagcgacggcgagaaccccaaagtggtgttcatcgagatcagcgaccagagactgagcatcggcagccccagcaagatctacgacagcctgggccagcccgtgttctaccaggccagcttcagctgggacaccatgatcaagttcggcgacgtgctgaccgtgaaccccctggtggtgaactggcggaacaataccgtgatctctagacccggccagagccagtgcccccggttcaacacctgccccgagatctgctgggagggcgtgtacaacgacgccttcctgatcgaccggatcaactggatcagcgccggagtgttcctggatagcaaccagaccgccgagaatcccgtgttcaccgtgtttaaggacaacgagatcctgtacagagcccagctggccagcgaggacaccaacgcccagaaaaccatcaccaactgcttcctgctgaagaataagatctggtgcatcagcctggtggagatctacgataccggcgacaacgtgatcaggcccaagctgttcgccgtgaagatccccgagcagtgctacccctacgacgtgcccgactacgcc

SEQ ID NO: 2043 - protein, 577 aa, Nipah henipavirus
MKKINEGLLDSKILSAFNTVIALLGSIVIIVMNIMIIQNYTRSTDNQAVIKDALQGIQQQIKGLADKIGTEIGPKVSLIDTSSTITIPANIGLLGSKISQSTASINENVNEKCKFTLPPLKIHECNISCPNPLPFREYRPQTEGVSNLVGLPNNICLQKTSNQILKPKLISYTLPVVGQSGTCITDPLLAMDEGYFAYSHLERIGSCSRGVSKQRIIGVGEVLDRGDEVPSLFMTNVWTPPNPNTVYHCSAVYNNEFYYVLCAVSTVGDPILNSTYWSGSLMMTRLAVKPKSNGGGYNQHQLALRSIEKGRYDKVMPYGPSGIKQGDTLYFPAVGFLVRTEFKYNDSNCPITKCQYSKPENCRLSMGIRPNSHYILRSGLLKYNLSDGENPKVVFIEISDQRLSIGSPSKIYDSLGQPVFYQASFSWDTMIKFGDVLTVNPLVVNWRNNTVISRPGQSQCPRFNTCPEICWEGVYNDAFLIDRINWISAGVFLDSNQTAENPVFTVFKDNEILYRAQLASEDTNAQKTITNCFLLKNKIWCISLVEIYDTGDNVIRPKLFAVKIPEQCYPYDVPDYA

SEQ ID NO: 2044 - DNA, 1572 bp, Nipah henipavirus
  source 1..1572: mol_type = genomic DNA
atggtggtgatcctggacaagcggtgctactgcaacctgctgatcctgatcctgatgatcagcgagtgcagcgtgggcatcctgcactacgagaagctgagcaagatcggcctggtgaagggcgtgacccggaagtacaagatcaagagcaaccccctgaccaaggacatcgtgatcaagatgatccccaacgtgagcaacatgagccagtgcaccggcagcgtgatggagaactacaagacccggctgaacggcatcctgacccccatcaagggcgccctggagatctacaagaacaacacccacgacctggtgggcgacgtgcggctggccggcgtgatcatggccggcgtggccatcggcatcgccacagccgcccagatcaccgccggagtggccctgtacgaggccatgaagaacgccgacaacatcaacaagctgaagagcagcatcgagagcaccaacgaggccgtggtgaagctgcaggagaccgccgagaaaaccgtgtacgtgctgaccgccctgcaggactacatcaacaccaacctggtgcccaccatcgacaagatcagctgcaagcagaccgagctgagcctggacctggccctgagcaagtacctgagcgacctgctgttcgtgttcggccccaacctgcaggaccccgtgagcaacagcatgaccatccaggccatcagccaggccttcggcggcaactacgagaccctgctgcggaccctgggctacgccaccgaggacttcgacgacctgctggagagcgacagcatcaccggccagatcatctacgtggacctgagcagctactacatcatcgtgcgggtgtacttccccatcctgaccgagatccagcaggcctacatccaggagctgctgcccgtgagcttcaacaacgacaacagcgagtggatcagcatcgtgcccaacttcatcctggtgcggaacaccctgatcagcaacatcgagatcggcttctgcctgatcaccaagcggagcgtgatctgcaaccaggactacgccacccccatgaccaacaacatgcgggagtgcctgaccggcagcaccgagaagtgccccagggagctggtggtgagcagccacgtgccccggttcgccctgagcaacggcgtgctgttcgccaactgcatcagcgtgacctgccagtgccagaccaccggcagagccatcagccagagcggcgagcagaccctgctgatgatcgacaacaccacctgccccaccgccgtgctgggcaacgtgatcatcagcctgggcaagtatctgggcagcgtgaactacaacagcgagggcatcgccatcggccctcccgtgttcaccgacaaggtggacatcagcagccagatcagcagcatgaaccagagcctgcagcagagcaaggattacatcaaggaggcccagcggctgctggacaccgtgaaccccagcctgatcagcatgctgtccatgatcatcctgtacgtgctgagcatcgccagcctgtgcatcggcctgatcaccttcatcagcttcatcatcgtggagaagaagcggaacacc

SEQ ID NO: 2045 - protein, 524 aa, Nipah henipavirus
MVVILDKRCYCNLLILILMISECSVGILHYEKLSKIGLVKGVTRKYKIKSNPLTKDIVIKMIPNVSNMSQCTGSVMENYKTRLNGILTPIKGALEIYKNNTHDLVGDVRLAGVIMAGVAIGIATAAQITAGVALYEAMKNADNINKLKSSIESTNEAVVKLQETAEKTVYVLTALQDYINTNLVPTIDKISCKQTELSLDLALSKYLSDLLFVFGPNLQDPVSNSMTIQAISQAFGGNYETLLRTLGYATEDFDDLLESDSITGQIIYVDLSSYYIIVRVYFPILTEIQQAYIQELLPVSFNNDNSEWISIVPNFILVRNTLISNIEIGFCLITKRSVICNQDYATPMTNNMRECLTGSTEKCPRELVVSSHVPRFALSNGVLFANCISVTCQCQTTGRAISQSGEQTLLMIDNTTCPTAVLGNVIISLGKYLGSVNYNSEGIAIGPPVFTDKVDISSQISSMNQSLQQSKDYIKEAQRLLDTVNPSLISMLSMIILYVLSIASLCIGLITFISFIIVEKKRNT

SEQ ID NO: 2046-2999 - skipped (954 entries)

SEQ ID NO: 3000 - RNA, 80 nt, synthetic construct; identical to SEQ ID NO: 224
  source 1..80: mol_type = other RNA

SEQ ID NO: 3001-4000 - skipped (1000 entries)

SEQ ID NO: 4001 - DNA, 1350 bp, unidentified
  source 1..1350: mol_type = unassigned DNA
atggatgccgacaagattgtattcaaagtcaataatcaggtggtctctttgaagcctgagattatcgtggatcaatatgagtacaagtaccctgccatcaaagatttgaaaaagccctgtataaccctaggaaaggctcccgatttaaataaagcatacaagtcagttttgtcaggcatgagcgccgccaaacttaatcctgacgatgtatgttcctatttggcagcggcaatgcagttttttgaggggacatgtccggaagactggaccagctatggaattgtgattgcacgaaaaggagataagatcaccccaggttctctggtggagataaaacgtactgatgtagaagggaattgggctctgacaggaggcatggaactgacaagagaccccactgtccctgagcatgcgtccttagtcggtcttctcttgagtctgtataggttgagcaaaatatccgggcaaaacactggtaactataagacaaacattgcagacaggatagagcagatttttgagacagccccttttgttaaaatcgtggaacaccatactctaatgacaactcacaaaatgtgtgctaattggagtactataccaaacttcagatttttggccggaacctatgacatgtttttctcccggattgagcatctatattcagcaatcagagtgggcacagttgtcactgcttatgaagactgttcaggactggtatcatttactgggttcataaaacaaatcaatctcaccgctagagaggcaatactatatttcttccacaagaactttgaggaagagataagaagaatgtttgagccagggcaggagacagctgttcctcactcttatttcatccacttccgttcactaggcttgagtgggaaatctccttattcatcaaatgctgttggtcacgtgttcaatctcattcactttgtaggatgctatatgggtcaagtcagatccctaaatgcaacggttattgctgcatgtgctcctcatgaaatgtctgttctagggggctatctgggagaggaattcttcgggaaagggacatttgaaagaagattcttcagagatgagaaagaacttcaagaatacgaggcggctgaactgacaaagactgacgtagcactggcagatgatggaactgtcaactctgacgacgaggactacttttcaggtgaaaccagaagtccggaggctgtttatactcgaatcatgatgaatggaggtcgactaaagagatctcacatacggagatatgtctcagtcagttccaatcatcaagcccgtccaaactcattcgccgagtttctaaacaagacatattcgagtgactca

SEQ ID NO: 4002 - protein, 450 aa, unidentified
MDADKIVFKVNNQVVSLKPEIIVDQYEYKYPAIKDLKKPCITLGKAPDLNKAYKSVLSGMSAAKLNPDDVCSYLAAAMQFFEGTCPEDWTSYGIVIARKGDKITPGSLVEIKRTDVEGNWALTGGMELTRDPTVPEHASLVGLLLSLYRLSKISGQNTGNYKTNIADRIEQIFETAPFVKIVEHHTLMTTHKMCANWSTIPNFRFLAGTYDMFFSRIEHLYSAIRVGTVVTAYEDCSGLVSFTGFIKQINLTAREAILYFFHKNFEEEIRRMFEPGQETAVPHSYFIHFRSLGLSGKSPYSSNAVGHVFNLIHFVGCYMGQVRSLNATVIAACAPHEMSVLGGYLGEEFFGKGTFERRFFRDEKELQEYEAAELTKTDVALADDGTVNSDDEDYFSGETRSPEAVYTRIMMNGGRLKRSHIRRYVSVSSNHQARPNSFAEFLNKTYSSDS

SEQ ID NO: 4003 - DNA, 6378 bp, unidentified
  source 1..6378: mol_type = unassigned DNA
ctcgatcctggagaggtctatgatgaccctattgacccaatcgagttagaggctgaacccagaggaacccccattgtccccaacatcttgaggaactctgactacaatctcaactctcctttgatagaagatcctgctagactaatgttagaatggttaaaaacagggaatagaccttatcggatgactctaacagacaattgctccaggtctttcagagttttgaaagattatttcaagaaggtagatttgggttctctcaaggtgggcggaatggctgcacagtcaatgatttctctctggttatatggtgcccactctgaatccaacaggagccggagatgtataacagacttggcccatttctattccaagtcgtcccccatagagaagctgttgaatctcacgctaggaaatagagggctgagaatccccccagagggagtgttaagttgccttgagagggttgattatgataatgcatttggaaggtatcttgccaacacgtattcctcttacttgttcttccatgtaatcaccttatacatgaacgccctagactgggatgaagaaaagaccatcctagcattatggaaagatttaacctcagtggacatcgggaaggacttggtaaagttcaaagaccaaatatggggactgctgatcgtgacaaaggactttgtttactcccaaagttccaattgtctttttgacagaaactacacacttatgctaaaagatcttttcttgtctcgcttcaactccttaatggtcttgctctctcccccagagccccgatactcagatgacttgatatctcaactatgccagctgtacattgctggggatcaagtcttgtctatgtgtggaaactccggctatgaagtcatcaaaatattggagccatatgtcgtgaatagtttagtccagagagcagaaaagtttaggcctctcattcattccttgggagactttcctgtatttataaaagacaaggtaagtcaacttgaagagacgttcggtccctgtgcaagaaggttctttagggctctggatcaattcgacaacatacatgacttggtttttgtgtttggctgttacaggcattgggggcacccatatatagattatcgaaagggtctgtcaaaactatatgatcaggttcaccttaaaaaaatgatagataagtcctaccaggagtgcttagcaagcgacctagccaggaggatccttagatggggttttgataagtactccaagtggtatctggattcaagattcctagcccgagaccaccccttgactccttatatcaaaacccaaacatggccacccaaacatattgtagacttggtgggggatacatggcacaagctcccgatcacgcagatctttgagattcctgaatcaatggatccgtcagaaatattggatgacaaatcacattctttcaccagaacgagactagcttcttggctgtcagaaaaccgaggggggcctgttcctagcgaaaaagttattatcacggccctgtctaagccgcctgtcaatccccgagagtttctgaggtctatagacctcggaggattgccagatgaagacttgataattggcctcaagccaaaggaacgggaattgaagattgaaggtcgattctttgctctaatgtcatggaatctaagattgtattttgtcatcactgaaaaactcttggccaactacatcttgccactttttgacgcgctgactatgacagacaacctgaacaaggtgtttaaaaagctgatcgacagggtcaccgggcaagggcttttggactattcaagggtcacatatgcatttcacctggactatgaaaagtggaacaaccatcaaagattagagtcaacagaggatgtattttctgtcctagatcaagtgtttggattgaagagagtgttttctagaacacacgagttttttcaaaaggcctggatctattattcagacagatcagacctcatcgggttacgggaggatcaaatatactgcttagatgcgtccaacggcccaacctgttggaatggccaggatggcgggctagaaggcttacggcagaagggctggagtctagtcagcttattgatgatagatagagaatctcaaatcaggaacacaagaaccaaaatactagctcaaggagacaaccaggttttatgtccgacatacatgttgtcgccagggctatctcaagaggggctcctctatgaattggagagaatatcaaggaatgcactttcgatatacagagccgtcgaggaaggggcatctaagctagggctgatcatcaagaaagaagagaccatgtgtagttatgacttcctcatctatggaaaaacccctttgtttagaggtaacatattggtgcctgagtccaaaagatgggccagagtctcttgcgtctctaatgaccaaatagtcaacctcgccaatataatgtcgacagtgtccaccaatgcgctaacagtggcacaacactctcaatctttgatcaaaccgatgagggattttctgctcatgtcagtacaggcagtctttcactacctgctatttagcccaatcttaaagggaagagtttacaagattctgagcgctgaaggggagagctttctcctagccatgtcaaggataatctatctagatccttctttgggagggatatctggaatgtccctcggaagattccatatacgacagttctcagaccctgtctctgaagggttatccttctggagagagatctggttaagctcccaagagtcctggattcacgcgttgtgtcaagaggctggaaacccagatcttggagagagaacactcgagagcttcactcgccttctagaagatccgaccaccttaaatatcagaggaggggccagtcctaccattctactcaaggatgcaatcagaaaggctttatatgacgaggtggacaaggtggaaaattcagagtttcgagaggcaatcctgttgtccaagacccatagagataattttatactcttcttaatatctgttgagcctctgtttcctcgatttctcagtgagctattcagttcgtcttttttgggaatccccgagtcaatcattggattgatacaaaactcccgaacgataagaaggcagtttagaaagagtctctcaaaaactttagaagaatccttctacaactcagagatccacgggattagtcggatgacccagacacctcagagggttgggggggtgtggccttgctcttcagagagggcagatctacttagggagatctcttggggaagaaaagtggtaggcacgacagttcctcacccttctgagatgttgggattacttcccaagtcctctatttcttgcacttgtggagcaacaggaggaggcaatcctagagtttctgtatcagtactcccgtcctttgatcagtcatttttttcacgaggccccctaaagggatacttgggctcgtccacctctatgtcgacccagctattccatgcatgggaaaaagtcactaatgttcatgtggtgaagagagctctatcgttaaaagaatctataaactggttcattactagagattccaacttggctcaagctctaattaggaacattatgtctctgacaggccctgatttccctctagaggaggcccctgtcttcaaaaggacggggtcagccttgcataggttcaagtctgccagatacagcgaaggagggtattcttctgtctgcccgaacctcctctctcatatttctgttagtacagacaccatgtctgatttgacccaagacgggaagaactacgatttcatgttccagccattgatgctttatgcacagacatggacatcagagctggtacagagagacacaaggctaagagactctacgtttcattggcacctccgatgcaacaggtgtgtgagacccattgacgacgtgaccctggagacctctcagatcttcgagtttccggatgtgtcgaaaagaatatccagaatggtttctggggctgtgcctcacttccagaggcttcccgatatccgtctgagaccaggagattttgaatctctaagcggtagagaaaagtctcaccatatcggatcagctcaggggctcttatactcaatcttagtggcaattcacgactcaggatacaatgatggaaccatcttccctgtcaacatatacggcaaggtttcccctagagactatttgagagggctcgcaaggggagtattgataggatcctcgatttgcttcttgacaagaatgacaaatatcaatattaatagacctcttgaattggtctcaggggtaatctcatatattctcctgaggctagataaccatccctccttgtacataatgctcagagaaccgtctcttagaggagagatattttctatccctcagaaaatccccgccgcttatccaaccactatgaaagaaggcaacagatcaatcttgtgttatctccaacatgtgctacgctatgagcgagagataatcacggcgtctccagagaatgactggctatggatcttttcagactttagaagtgccaaaatgacgtacctatccctcattacttaccagtctcatcttctactccagagggttgagagaaacctatctaagagtatgagagataacctgcgacaattgagttctttgatgaggcaggtgctgggcgggcacggagaagataccttagagtcagacgacaacattcaacgactgctaaaagactctttacgaaggacaagatgggtggatcaagaggtgcgccatgcagctagaaccatgactggagattacagccccaacaagaaggtgtcccgtaaggtaggatgttcagaatgggtctgctctgctcaacaggttgcagtctctacctcagcaaacccggcccctgtctcggagcttgacataagggccctctctaagaggttccagaaccctttgatctcgggcttgagagtggttcagtgggcaaccggtgctcattataagcttaagcctattctagatgatctcaatgttttcccatctctctgccttgtagttggggacgggtcaggggggatatcaagggcagtcctcaacatgtttccagatgccaagcttgtgttcaacagtcttttagaggtgaatgacctgatggcttccggaacacatccactgcctccttcagcaatcatgaggggaggaaatgatatcgtctccagagtgatagatcttgactcaatctgggaaaaaccgtccgacttgagaaacttggcaacctggaaatacttccagtcagtccaaaagcaggtcaacatgtcctatgacctcattatttgcgatgcagaagttactgacattgcatctatcaaccggatcaccctgttaatgtccgattttgcattgtctatagatggaccactctatttggtcttcaaaacttatgggactatgctagtaaatccaaactacaaggctattcaacacctgtcaagagcgttcccctcggtcacagggtttatcacccaagtaacttcgtctttttcatctgagctctacctccgattctccaaacgagggaagtttttcagagatgctgagtacttgacctcttccacccttcgagaaatgagccttgtgttattcaattgtagcagccccaagagtgagatgcagagagctcgttccttgaactatcaggatcttgtgagaggatttcctgaagaaatcatatcaaatccttacaatgagatgatcataactctgattgacagtgatgtagaatcttttctagtccacaagatggttgatgatcttgagttacagaggggaactctgtctaaagtggctatcattatagccatcatgatagttttctccaacagagtcttcaacgtttccaaacccctaactgacccctcgttctatccaccgtctgatcccaaaatcctgaggcacttcaacatatgttgcagtactatgatgtatctatctactgctttaggtgacgtccctagcttcgcaagacttcacgacctgtataacagacctataacttattacttcagaaagcaagtcattcgagggaacgtttatctatcttggagttggtccaacgacacctcagtgttcaaaagggtagcctgtaattctagcctgagtctgtcatctcactggatcaggttgatttacaagatagtgaagactaccagactcgttggcagcatcaaggatctatccagagaagtggaaagacaccttcataggtacaacaggtggatcaccctagaggatatcagatctagatcatccctactagactacagttgcctg

SEQ ID NO: 4004 - protein, 2126 aa, unidentified
LDPGEVYDDPIDPIELEAEPRGTPIVPNILRNSDYNLNSPLIEDPARLMLEWLKTGNRPYRMTLTDNCSRSFRVLKDYFKKVDLGSLKVGGMAAQSMISLWLYGAHSESNRSRRCITDLAHFYSKSSPIEKLLNLTLGNRGLRIPPEGVLSCLERVDYDNAFGRYLANTYSSYLFFHVITLYMNALDWDEEKTILALWKDLTSVDIGKDLVKFKDQIWGLLIVTKDFVYSQSSNCLFDRNYTLMLKDLFLSRFNSLMVLLSPPEPRYSDDLISQLCQLYIAGDQVLSMCGNSGYEVIKILEPYVVNSLVQRAEKFRPLIHSLGDFPVFIKDKVSQLEETFGPCARRFFRALDQFDNIHDLVFVFGCYRHWGHPYIDYRKGLSKLYDQVHLKKMIDKSYQECLASDLARRILRWGFDKYSKWYLDSRFLARDHPLTPYIKTQTWPPKHIVDLVGDTWHKLPITQIFEIPESMDPSEILDDKSHSFTRTRLASWLSENRGGPVPSEKVIITALSKPPVNPREFLRSIDLGGLPDEDLIIGLKPKERELKIEGRFFALMSWNLRLYFVITEKLLANYILPLFDALTMTDNLNKVFKKLIDRVTGQGLLDYSRVTYAFHLDYEKWNNHQRLESTEDVFSVLDQVFGLKRVFSRTHEFFQKAWIYYSDRSDLIGLREDQIYCLDASNGPTCWNGQDGGLEGLRQKGWSLVSLLMIDRESQIRNTRTKILAQGDNQVLCPTYMLSPGLSQEGLLYELERISRNALSIYRAVEEGASKLGLIIKKEETMCSYDFLIYGKTPLFRGNILVPESKRWARVSCVSNDQIVNLANIMSTVSTNALTVAQHSQSLIKPMRDFLLMSVQAVFHYLLFSPILKGRVYKILSAEGESFLLAMSRIIYLDPSLGGISGMSLGRFHIRQFSDPVSEGLSFWREIWLSSQESWIHALCQEAGNPDLGERTLESFTRLLEDPTTLNIRGGASPTILLKDAIRKALYDEVDKVENSEFREAILLSKTHRDNFILFLISVEPLFPRFLSELFSSSFLGIPESIIGLIQNSRTIRRQFRKSLSKTLEESFYNSEIHGISRMTQTPQRVGGVWPCSSERADLLREISWGRKVVGTTVPHPSEMLGLLPKSSISCTCGATGGGNPRVSVSVLPSFDQSFFSRGPLKGYLGSSTSMSTQLFHAWEKVTNVHVVKRALSLKESINWFITRDSNLAQALIRNIMSLTGPDFPLEEAPVFKRTGSALHRFKSARYSEGGYSSVCPNLLSHISVSTDTMSDLTQDGKNYDFMFQPLMLYAQTWTSELVQRDTRLRDSTFHWHLRCNRCVRPIDDVTLETSQIFEFPDVSKRISRMVSGAVPHFQRLPDIRLRPGDFESLSGREKSHHIGSAQGLLYSILVAIHDSGYNDGTIFPVNIYGKVSPRDYLRGLARGVLIGSSICFLTRMTNININRPLELVSGVISYILLRLDNHPSLYIMLREPSLRGEIFSIPQKIPAAYPTTMKEGNRSILCYLQHVLRYEREIITASPENDWLWIFSDFRSAKMTYLSLITYQSHLLLQRVERNLSKSMRDNLRQLSSLMRQVLGGHGEDTLESDDNIQRLLKDSLRRTRWVDQEVRHAARTMTGDYSPNKKVSRKVGCSEWVCSAQQVAVSTSANPAPVSELDIRALSKRFQNPLISGLRVVQWATGAHYKLKPILDDLNVFPSLCLVVGDGSGGISRAVLNMFPDAKLVFNSLLEVNDLMASGTHPLPPSAIMRGGNDIVSRVIDLDSIWEKPSDLRNLATWKYFQSVQKQVNMSYDLIICDAEVTDIASINRITLLMSDFALSIDGPLYLVFKTYGTMLVNPNYKAIQHLSRAFPSVTGFITQVTSSFSSELYLRFSKRGKFFRDAEYLTSSTLREMSLVLFNCSSPKSEMQRARSLNYQDLVRGFPEEIISNPYNEMIITLIDSDVESFLVHKMVDDLELQRGTLSKVAIIIAIMIVFSNRVFNVSKPLTDPSFYPPSDPKILRHFNICCSTMMYLSTALGDVPSFARLHDLYNRPITYYFRKQVIRGNVYLSWSWSNDTSVFKRVACNSSLSLSSHWIRLIYKIVKTTRLVGSIKDLSREVERHLHRYNRWITLEDIRSRSSLLDYSCL

SEQ ID NO: 4005 - DNA, 603 bp, unidentified
  source 1..603: mol_type = unassigned DNA
ttctagaagcagagaggaatctttgtcctcttcggacctttgtgtctgaagagacatgtcagaccatagttgacatgctctcgggttcatgttgatacaccagactctgccctggatatgacactgttttgcaatcactcttatttgcaatccgacgaactcagtatcatcatcccaagtgatctcctgagagtattccaactcctccccttcaagagggcccctggaatcagcccactggaagataaaggttctcctcaatttgtatacccagttcaggccctcagggactggagatcctgacaaagccagtccaataaccactttgactaacccgatcatcctatgattcccagaatatatctcgtcgaatgatttcagaatgtgccgcaggatcctgaacgagtaaccattcgggctacacactttaacccttccgttgatacaaaagttcctcatgttcttcttgcctgtaagttctttcagcgggacgtattcagggggtggaagccacaagtcatcgtcatccagaggggctgacgcgggagaggatttttgagtgtcctcgtccctgcggtttttcactatcttacgtaggaggtt

SEQ ID NO: 4006 - protein, 201 aa, unidentified
NLLRKIVKNRRDEDTQKSSPASAPLDDDDLWLPPPEYVPLKELTGKKNMRNFCINGRVKVCSPNGYSFRILRHILKSFDEIYSGNHRMIGLVKVVIGLALSGSPVPEGLNWVYKLRRTFIFQWADSRGPLEGEELEYSQEITWDDDTEFVGLQIRVIAKQCHIQGRVWCINMNPRACQLWSDMSLQTQRSEEDKDSSLLLE

SEQ ID NO: 4007 - DNA, 888 bp, unidentified
  source 1..888: mol_type = unassigned DNA
agcaagatctttgtcaatcctagtgctattagagccggtctggccgatcttgagatggctgaagaaactgttgatctgatcaatagaaatatcgaagacaatcaggctcatctccaaggggaacccatagaggtggacaatctccctgaggatatggggcgacttcacctggatgatggaaaatcgcccaaccatggtgagatagccaaggtgggagaaggcaagtatcgagaggactttcagatggatgaaggagaggatcctagcttcctgttccagtcatacctggaaaatgttggagtccaaatagtcagacaaatgaggtcaggagagagatttctcaagatatggtcacagaccgtagaagagattatatcctatgtcgcggtcaactttcccaaccctccaggaaagtcttcagaggataaatcaacccagactactggccgagagctcaagaaggagacaacacccactccttctcagagagaaagccaatcatcgaaagccaggatggcggctcaaattgcttctggccctccagcccttgaatggtcggctaccaatgaagaggatgatctatcagtggaggctgagatcgctcaccagattgcagaaagtttctccaaaaaatataagtttccctctcgatcctcagggatactcttgtataattttgagcaattgaaaatgaaccttgatgatatagttaaagaggcaaaaaatgtaccaggtgtgacccgtttagcccatgacgggtccaaactccccctaagatgtgtactgggatgggtcgctttggccaactctaagaaattccagttgttagtcgaatccgacaagctgagtaaaatcatgcaagatgacttgaatcgctatacatcttgc

SEQ ID NO: 4008 - protein, 296 aa, unidentified
SKIFVNPSAIRAGLADLEMAEETVDLINRNIEDNQAHLQGEPIEVDNLPEDMGRLHLDDGKSPNHGEIAKVGEGKYREDFQMDEGEDPSFLFQSYLENVGVQIVRQMRSGERFLKIWSQTVEEIISYVAVNFPNPPGKSSEDKSTQTTGRELKKETTPTPSQRESQSSKARMAAQIASGPPALEWSATNEEDDLSVEAEIAHQIAESFSKKYKFPSRSSGILLYNFEQLKMNLDDIVKEAKNVPGVTRLAHDGSKLPLRCVLGWVALANSKKFQLLVESDKLSKIMQDDLNRYTSC

SEQ ID NO: 4009 - DNA, 1572 bp, unidentified; identical to SEQ ID NO: 2000
  source 1..1572: mol_type = unassigned DNA

SEQ ID NO: 4010 - protein, 524 aa, unidentified; identical to SEQ ID NO: 2001

SEQ ID NO: 4011 - DNA, 20 bp, unidentified
  source 1..20: mol_type = unassigned DNA
gaacacaaagcatagactgc

SEQ ID NO: 4012 - protein, 21 aa, synthetic construct
  VARIANT 1..21: note = This sequence may encompass 1, 3, or 7 GGS repeating units
GGSGGSGGSGGSGGSGGSGGS

SEQ ID NO: 4013 - protein, 9 aa, unidentified
LAGLIDADG

1. A pseudotyped recombinant lyssavirus particle, comprising a heterologous envelope protein and a recombinant lyssavirus genome, wherein
the recombinant lyssavirus genome does not encode an endogenous envelope protein or fragment thereof and comprises a nucleic acid encoding a therapeutic transgene.

2. The pseudotyped particle of claim 1, wherein the nucleic acid encoding the therapeutic transgene is greater than: about 300 bp, about 400 bp, about 500 bp, about 600 bp, about 650 bp, about 700 bp, about 800 bp, about 900 bp, about 1,000 bp, about 1,100 bp, about 1,200 bp, about 1,300 bp, about 1,400 bp, about 1,500 bp, about 1,600 bp, about 1,700 bp, about 1,800 bp, about 1,900 bp, about 2,000 bp, about 2,100 bp, about 2,200 bp, about 2,300 bp, about 2,400 bp, about 2,500 bp, about 2,600 bp, about 2,700 bp, about 2,800 bp, about 2,900 bp, about 3,000 bp, about 4,500 bp, about 8,500 bp, about 10,000 bp.

3-9. (canceled)

10. The pseudotyped particle of claim 1, wherein the recombinant lyssavirus particle is a recombinant rabies virus particle, optionally wherein the heterologous envelope protein is a non-rabies virus envelope protein.

11. (canceled)

12. The pseudotyped particle of claim 1, wherein the heterologous envelope protein is a envelope protein of a virus in the Togaviridae family, or variant thereof, optionally wherein the virus in the Togaviridae family is an alphavirus, optionally wherein the alphavirus is selected from the group consisting of: a sindbis virus (SINV), a chikungunya virus (CHIKV), a Mayaro virus (MAYV), an o'nyong'nyong virus (ONNV), a Ross River virus (RRV), and an equine encephalitis virus (EEV), optionally wherein:
the SINV envelope protein comprises an amino acid sequence with at least 80% identity to an amino acid sequence set forth in SEQ ID NO: 2003 or 2005;
the CHIKV envelope protein comprises an amino acid sequence with at least 80% identity to an amino acid sequence set forth in SEQ ID NO: 2009;
the MAYV envelope protein comprises an amino acid sequence with at least 80% identity to an amino acid sequence set forth in SEQ ID NO: 2011;
the ONNV envelope protein comprises an amino acid sequence with at least 80% identity to an amino acid sequence set forth in SEQ ID NO: 2013; and
the RRV envelope protein comprises an amino acid sequence with at least 80% identity to an amino acid sequence set forth in SEQ ID NO: 2015, optionally wherein:
the EEV is selected from the group consisting of: a western equine encephalitis virus (WEEV), an eastern equine encephalitis virus (EEEV), and a Venezuelan equine encephalitis virus (VEEV), optionally wherein:
the WEEV envelope protein comprises an amino acid sequence with at least 80% identity to an amino acid sequence set forth in SEQ ID NO: 2017;
the EEEV envelope protein comprises an amino acid sequence with at least 80% identity to an amino acid sequence set forth in SEQ ID NO: 2019; and
the VEEV envelope protein comprises an amino acid sequence with at least 80% identity to an amino acid sequence set forth in SEQ ID NO: 2021.

13-15. (canceled)

16. The pseudotyped particle of claim 1, wherein the heterologous envelope protein is a envelope protein of a tibrovirus, or variant thereof, optionally wherein the tibrovirus is an Ekpoma virus (EKV), optionally wherein: the ekpoma virus is Ekpoma virus 1 (EKV-1) or Ekpoma virus 2 (EKV-2), optionally wherein:
the EKV-1 envelope protein comprises an amino acid sequence with at least 80% identity to an amino acid sequence set forth in SEQ ID NO: 2029; and
the EKV-2 envelope protein comprises an amino acid sequence with at least 80% identity to an amino acid sequence set forth in SEQ ID NO: 2031.

17-18. (canceled)

19. The pseudotyped particle of claim 1, wherein the heterologous envelope protein is a envelope protein of a virus in the Flaviviridae family, or variant thereof, optionally wherein the virus in the Flaviviridae family is selected from the group consisting of a Hepacivirus, a pegivirus, and a flavivirus, optionally wherein the Hepacivirus is hepatitis C virus (HCV), optionally wherein the HCV envelope protein comprises an amino acid sequence with at least 80% identity to an amino acid sequence set forth in SEQ ID NO: 2033, optionally wherein the pegivirus is human pegivirus type 1 (HPgV-1) or human pegivirus type 2 (HPgV-2), optionally wherein:
the HPgV-1 envelope protein comprises an amino acid sequence with at least 80% identity to an amino acid sequence set forth in SEQ ID NO: 2035; and
the HPgV-2 envelope protein comprises an amino acid sequence with at least 80% identity to an amino acid sequence set forth in SEQ ID NO: 2037, optionally wherein the flavivirus is Zika virus (ZIKV), optionally wherein the ZIKV envelope protein comprises an amino acid sequence with at least 80% identity to an amino acid sequence set forth in SEQ ID NO: 2039.

20-23. (canceled)

24. The pseudotyped particle of claim 1, wherein the heterologous envelope protein is a envelope protein of a virus in the Filoviridae family, or variant thereof, optionally wherein the virus in the Filoviridae family is Marburg virus (MARV), optionally wherein the MARV envelope protein comprises an amino acid sequence with at least 80% identity to an amino acid sequence set forth in SEQ ID NO: 2041.

25. (canceled)

26. The pseudotyped particle of claim 1, wherein the heterologous envelope protein is a envelope protein of a virus in the Paramyxoviridae family, or variant thereof, optionally wherein the virus in the Paramyxoviridae family is a Henipavirus, optionally wherein the Henipavirus is Nipah/Hendra virus (NIV), optionally wherein the NIV envelope protein comprises an amino acid sequence with at least 80% identity to an amino acid sequence set forth in SEQ ID NO: 2043.

27-28. (canceled)

29. The pseudotyped particle of claim 1, wherein the heterologous envelope protein is a envelope protein of a virus in the Retroviridae family, or variant thereof, optionally wherein the virus in the Retroviridae family is a lentivirus, optionally wherein the lentivirus is an a human immunodeficiency virus type 1 (HIV-1) or a human immunodeficiency virus type 2 (HIV-2), and/or wherein the virus in the Retroviridae family is a baboon endogenous retrovirus (BAEV).

30-32. (canceled)

33. The pseudotyped particle of claim 1, wherein the therapeutic transgene comprises a nucleic acid editing system or a component thereof, optionally wherein:
the nucleic acid editing system or component thereof is selected from the group consisting of a Clustered Regulatory Interspaced Short Palindromic Repeat (CRISPR) system, a zinc finger protein (ZF), a meganuclease, and a Transcription Activator-Like Effector-based protein (TALE), optionally wherein:
the nucleic acid editing system is a CRISPR system, optionally wherein the CRISPR-system comprises a nucleobase editor comprising a polynucleotide programmable nucleotide binding domain and a nucleobase editing domain, optionally wherein:
the nucleobase editing domain is an adenosine deaminase, cytidine deaminase, cytosine deaminase, or a functional variant thereof, optionally wherein:
the adenosine deaminase is a adenosine deaminase recited in Table 10, Table 11, Table 12, Table 13, Table 14, or Table 15, optionally wherein:
the adenosine deaminase is selected from the group consisting of: ABE 0.1, ABE 0.2, ABE 1.1, ABE 1.2, ABE2.1, ABE2.2, ABE2.3, ABE2.4, ABE2.5, ABE2.6, ABE2.7, ABE2.8, ABE2.9, ABE2.10, ABE2.11, ABE2.12, ABE3.1, ABE3.2, ABE3.3, ABE3.4, ABE3.5, ABE3.6, ABE3.7, ABE3.8, ABE4.1, ABE4.2, ABE4.3, ABE5.1, ABE5.2, ABE5.3, ABE5.4, ABE5.5, ABE5.6, ABE5.7, ABE5.8, ABE5.9, ABE5.10, ABE5.11, ABE5.12, ABE5.13, ABE5.14, ABE6.1, ABE6.2, ABE6.3, ABE6.4, ABE6.5, ABE6.6, ABE7.1, ABE7.2, ABE7.3, ABE7.4, ABE7.5, ABE7.6, ABE7.7, ABE7.8, ABE 7.9, ABE7.10, ABE8.1-m, ABE8.2-m, ABE8.3-m, ABE8.4-m, ABE8.5-m, ABE8.6-m, ABE8.7-m, ABE8.8-m, ABE8.9-m, ABE8.10-m, ABE8.11-m, ABE8.12-m, ABE8.13-m, ABE8.14-m, ABE8.15-m, ABE8.16-m, ABE8.17-m, ABE8.18-m, ABE8.19-m, ABE8.20-m, ABE8.21-m, ABE8.22-m, ABE8.23-m, ABE8.24-m, ABE8.1-d, ABE8.2-d, ABE8.3-d, ABE8.4-d, ABE8.5-d, ABE8.6-d, ABE8.7-d, ABE8.8-d, ABE8.9-d, ABE8.10-d, ABE8.11-d, ABE8.12-d, ABE8.13-d, ABE8.14-d, ABE8.15-d, ABE8.16-d, ABE8.17-d, ABE8.18-d, ABE8.19-d, ABE8.20-d, ABE8.21-d, ABE8.22-d, ABE8.23-d, ABE8.24-d, ABE8a-m, ABE8b-m, ABE8c-m, ABE8d-m, ABE8e-m, ABE8a-d, ABE8b-d, ABE8c-d, ABE8d-d, ABE8e-d, ABE9.1, ABE9.2, ABE9.3, ABE9.4, ABE9.5, ABE9.6, ABE9.7, ABE9.8, ABE9.9, ABE9.10, ABE9.11, ABE9.12, ABE9.13, ABE9.14, ABE9.15, ABE9.16, ABE9.17, ABE9.18, ABE9.19, ABE9.2, ABE9.21, ABE9.22, ABE9.23, ABE9.24, ABE9.25, ABE9.26, ABE9.27, ABE9.28, ABE9.29, ABE9.30, ABE9.31, ABE9.32, ABE9.33, ABE9.34, ABE9.35, ABE9.36, ABE9.37, ABE9.38, ABE9.39, ABE9.40, ABE9.41, ABE9.42, ABE9.43, ABE9.44, ABE9.45, ABE9.46, ABE9.47, ABE9.48, ABE9.49, ABE9.50, ABE9.51, ABE9.52, ABE9.53, ABE9.54, ABE9.55, ABE9.56, ABE9.57, and ABE9.58, optionally wherein:
the polynucleotide programmable nucleotide binding domain is a Cas9 polypeptide, a Cas12 polypeptide, or a functional variant thereof, optionally wherein:
the CRISPR-system further comprises a guide RNA (gRNA) or a nucleic acid sequence encoding a gRNA.

34-43. (canceled)

44. The pseudotyped particle of claim 1, wherein the therapeutic transgene comprises a therapeutic polypeptide and/or a therapeutic nucleic acid, optionally wherein:
the therapeutic transgene is operably linked to a transcriptional regulatory element, optionally wherein:
the transcriptional regulatory element comprises a transcription initiation signal, optionally wherein:
the transcription initiation signal is exogenous to the rabies virus, optionally wherein:
the transcription initiation signal is endogenous to the rabies virus. Optionally wherein:
the therapeutic transgene is operably linked to a transcription termination polyadenylation signal.

45-49. (canceled)

50. The pseudotyped particle of claim 1, wherein the recombinant lyssavirus genome lacks a G gene encoding for a envelope protein or a functional variant thereof, and/or the genome lacks an L gene encoding for a polymerase or a functional variant thereof, optionally wherein:
the recombinant lyssavirus genome lacks a G gene encoding for a envelope protein or a functional variant thereof, optionally wherein:
the recombinant lyssavirus genome lacks a G gene encoding for a envelope protein or a functional variant thereof, and wherein the genome lacks an L gene encoding for a polymerase or a functional variant thereof, optionally wherein:
the recombinant lyssavirus genome comprises:
an N gene encoding for a nucleoprotein or a functional variant thereof;
a P gene encoding for a phosphoprotein or a functional variant thereof; and
an M gene encoding for a matrix protein or a functional variant thereof.

51-53. (canceled)

54. A pseudotyped recombinant lyssavirus particle, comprising a heterologous envelope protein and a recombinant lyssavirus genome, wherein
the heterologous envelope protein is a envelope protein of a virus in the Togaviridae family;
the recombinant lyssavirus genome does not encode an endogenous envelope protein or fragment thereof and comprises a nucleic acid encoding a therapeutic transgene.

55. The pseudotyped particle of claim 54, wherein the virus in the Togaviridae family is an alphavirus, optionally wherein the alphavirus is selected from the group consisting of: a sindbis virus (SINV), a chikungunya virus (CHIKV), a Mayaro virus (MAYV), an o'nyong'nyong virus (ONNV), a Ross River virus (RRV), and an equine encephalitis virus (EEV), optionally wherein the EEV is selected from the group consisting of: a western equine encephalitis virus (WEEV), an eastern equine encephalitis virus (EEEV), and a Venezuelan equine encephalitis virus (VEEV).

56-57. (canceled)

58. A pseudotyped recombinant lyssavirus particle, comprising a heterologous envelope protein and a recombinant lyssavirus genome, wherein
the heterologous envelope protein is a envelope protein of a virus in the Filoviridae family;
the recombinant lyssavirus genome does not encode an endogenous envelope protein or fragment thereof and comprises a nucleic acid encoding a therapeutic transgene.

59. The pseudotyped particle of claim 58, wherein the virus in the Filoviridae family is Marburg virus (MARV).

60-80. (canceled)

81. The pseudotyped particle of claim 1, wherein the recombinant lyssavirus particle is capable of transfecting a human cell, wherein the human cell expresses the therapeutic transgene.

82. The pseudotyped particle of claim 1, wherein the recombinant lyssavirus genome does not encode an envelope protein or fragment thereof.

83. A pharmaceutical composition comprising the pseudotyped particle of claim 1.

84. A method for expressing a therapeutic transgene in a target cell, comprising transducing a target cell with the pseudotyped particle of claim 1, optionally wherein:
the target cell is a neuronal cell, an epithelial cell, a hepatocyte, an immune cell, a muscle cell, a kidney cell, a lung cell, or a bone cell, optionally wherein:
the target cell is a human cell, optionally wherein:
the target cell is in a human.

85-87. (canceled)

88. A method for delivering a therapeutic transgene to a subject, comprising administering to the subject the pseudotyped particle of claim 1.

89. A packaging system capable of producing the pseudotyped particle of claim 1, optionally wherein:
the packaging cell is of a mammalian, a bacterial, or an insect origin, optionally wherein:
the packaging cell is selected from the group consisting of a HEK293 cell, a VERO cell, a BHK cell, and a BSR cell.

90. A method for producing a pseudotyped recombinant lyssavirus particle, the method comprising:
introducing the packaging system of claim 89 into a first cell to form a recombinant lyssavirus particle, thereby generating a supernatant comprising the recombinant lassavirus particle; and/or introducing into the packaging cell of claim 89, a nucleic acid comprising a recombinant lyssavirus genome comprising a nucleic acid comprising a therapeutic transgene, to form a recombinant lyssavirus particle, thereby generating a supernatant comprising the recombinant lassavirus particle:
isolating the supernatant comprising the recombinant lyssavirus particle; and
contacting the supernatant with a second cell that expresses a heterologous envelope protein, thereby producing the pseudotyped recombinant lyssavirus particle, optionally wherein:
the second cell expresses the heterologous envelope protein, optionally wherein:
the second cell stably or transiently expresses the heterologous envelope protein, optionally wherein:
the introducing is mediated by electroporation, nucleofection, transduction, or lipofection, optionally wherein:
the first and/or the second cell is of a mammalian, a bacterial, or an insect origin, and/or the cell that expresses the heterologous envelope protein is of a mammalian, a bacterial, or an insect origin, optionally wherein:
the first and/or the second cell is selected from the group consisting of a HEK293 cell, a VERO cell, a BHK cell, and a BSR cell.

91-102. (canceled)
